United States Patent Application Publication US 2026/0191916 A1 - sequence listing, part 4

SEQ ID NO: 2 - DNA, 5171824 bp, Parabacteroides distasonis (residues 1,723,943-3,447,884 of 5,171,824)
  source 1..5171824: mol_type = genomic DNA
ggaccattgcttcgcccacgtggtaggattctacatcttcatgtcgaagggagcctcggtagctaccgtgcaggtagggcgtaccggtatggagaccttgaagaatatccctatcaatataaaggagttcaagccgtacctgatactgagcgtccccgccttggcgaagaacttcaagaagaatatcgagcaaggtatccgagcgcaaggcaagaacgccgtccgccttttcaacctagccttacggatcggttatatctataatggggatagcgacgaggaggaaggaaaaggtttccgcgtcctcttgaagccactggtccgtttgttcgacaagctattgttcgcgaaagtccgtgagaacttcgggggcgaactgaagttctttatcggagggggcgccttgctggataaggacttgcagaagttctattacgccttgggaatcccgatgtaccaaggatacgggctgagcgaggcgacaccgatcatctcgaccaacggcccccgccgccacgtcttcggcagtagcggcgtattggtgcggcccctcgacctaaagatctgcgacatggacggcaacgtacttcctccgggggagaaaggcgagatcgtcatccggggagagaacgtgatggccggctactggaagaacccggcatcgacggccgataccgtaaaggagggttggctgtacaccggggatatgggatatatgcgtgacgggcttctttatgtgttgggtcgtttcaagagcctgctgatcggaagcgacggggagaaatacagtccggagggtatagaggaagccttggtagagcattcctcttgcatcgaccaactgatcctgtacaataaccagagtccgtacacgaccgccctgttggtccctaacaaagaacggttgcggaagcatctggcccaccagaatctggacctcacgagcgatcaaggccgggaagaggccatccgtaccatccagcgccagatcaaccgcttccgcaagggaggcgacctgtccaccctattcccggatcgttggttgccgaccaccttcgccatcctccccgagcctttcaccgagcaaaacggcatggtaaacagcaccatgaagatcgtccggggcaaggtagagaaagcctacgccgcccgtatcgcccagctctatactcccgaggggaagaacccgctgaacaagtggaacaaggaggcgttgtagagacgcggcgtgccgcatctcatcccccgcgatgggccttgctaccccggcaaggcctttgttgtttcaagagggccgcagaacgagaacaacacaaagatatttatgtaaaaaacaaagtttatttttgcttttatgtaattttctactgacctttgacagtgattaataattgcctattccataaatagtagccccccagctcctcggagtttcttctcacagctaatatggtttaataatttctttcttgagaaatgaatctctaaatctaattttatatgaaaactaaatttttagcacaattactgttatcaacatgtttgatatcctcctgcacgagcgaagatatagaattttcagatgtagacgaacagggatcgatagaaaccaccacgttggatatcgatgaagccaaaagtttattgcaagagttcgtggccgatgctttcacgaagtctaacacgtctttcacgatcaaagagcataaattaaagactctgtatattgataacacagagaccttgcccgttacagtcagagatacgatacccgtttatgagttcactaccgagacggatggacaagagggctactccgtggtagtcggagataaaagagtagagaaagtgctcatttcagtaccttccggtcttttatcggacacatcgttcatcgaacctttgcgattgtattatagagatatcccgatgctcattcagcaagatctgaatcaatattacgcagagacacaagaaaaggccattcaaacaaagatgagtgtggaagcttgctataaagacctacctacactttggagtcaaggatatccctataatgaaaaatgtccaataaagtgttatgaccatgcgcttgctggatgtaatgccattgctatcgcccagatcctcgcttatcacagagtcccaacaaaccttaattggaatgctatcttagctagctctacggtaacatcttcttctagcgcaactgtcatagatcaagtgagcacacttatagcaaacataggaagtaaaatcagcacagagtatgaatgtctcgaaagtggagcatctccaagcaatataccatcctgtctaatttcttatgggcttaaagcagatggtatcgtaacactttccgttgaagaatgtaaaatgaaccttcaaaatggaagaccggcgattcttttcggatatacggcatcaaatgcaggccacacatgggtttgcgatggatggaaaaaacatatatatgatgacggaaattgctatgattacttaaaaatgaattggggttggggaggcgattcgaacggattcttcttaatagaatacccaatgtctttcaatgccggaggatatttatttaacaaaaatctaaagatgatttgcaatatacataaactataaacatataagatactcatgagaaaaacaatcatactcgcttcaatcttctccttcatcctcatagcctgcaccaaggatgacaacacatggaaatatggcgacaaacaggagttggcaggctcggaatggctcaaagtagaaatgtatcccgtgacttatgtctccaacgagggattctctcccatccggaaccccaaagagcaaacgctgcgtttcgaggacgacggcttcacgatgacgactaaaggcagtgtgcatgatgacgaatcgcaaatcatgcgggatactatcatcctcacgcacggacgctacgagtacgagcaccctaccctgcgattgacacccgactccggcagcccctccgtggaggcatggatctcccctctgaacaggatttgcttccatgataacggagacctccgagagttcaaacggaaataacgatccgccgaggcccggccatcacggttgggcctcgcattttctaaagattcgacctcgcgcttgccgcggaatgccgcatttccccaagattcgaccgcacacccgatgtaacccccgcatttttccaagattcgactgcgcacccgccgcaaggtctcgcatttccccaagattccgtttcgcgcccgatgtaagccccgtattttcccaagattcaacttttcacctgccgcgaggtcgaatccgcgaaaaacacggtagtttccagagctatatccaccgatttgtcttacctttagccagtattaaacctgatcatggatctaaatcaacaagaaaatggaaaagattacaaaagtaaaagacattaacatcacgaaattgaacaacgccgagtaccgaaccttcatggcccgctacgggaacctgctcgcgggtggcggaggcgactcggaatctcccgacgaaatcagcttcgacccgaacgacccgctgggcatcccccaagaacttcgtacggccttcgccgccgatttcgccctattgaccgacgccgtgaaccaatcctcggccagcgaggagaccgcgcagatgtccaccctcgacaaggagagggatgatctcttgatcttcattacttccaccattacccaaatgacgaaaagcccgctggtggcacaacgcacggcggccgagaagctataccttcccgtgaagccctacatcggcgccgcacgcctcgccaacttgcaggagacggccgccatcgagggcttgctggtagacctcgacaaggacggcatgcccgaggcgctggcggcgctcaccctcaccgaggtagtggcctcgctgaaggagaagaaccagcaatacgcagccttgaccgagcagcgcaccaacgcacaagccgacaaccccgtagagagcgccaagaagatccgcctccgcatggacgaggaatacgacgagatgaccacctacgccttcgcccagagcgtggtgaagccaacggccacgaccgccaccttcatcaaccgcctcaacaccctcatcgacgagaccaacgccctctataaccagcgcatagcgcaggcgaaagccgccgccaagaagcaagcggatagcgaatcgccgtcagagatataaagccgtgaggccctcatgttttttagatttaagaatgatggggctcccctccctccaaggaggggatgccccattgattaatgattattaatagcctctcccccctccctcccacgaaaaaaacatacctttgccaactgtattatccgtgaaggaataacgagacatttacatgataagatctattcgctatatcactttgctagtcctgttacaattcgtgaccggcatttccgtcctatacgcccagagcataacttccgcttccggaatcgtgagagactccgtaagcggggaacccctatcctacgtatccgtcatgttcgagaactcgacgatcggggcgatgaccgacgatgacggggctttcagcctccagaacgacaaggggctcacccgactggtcctctcttccctaggatatgacaacaaggcggtaaacctcaaggccgggcggaagaacgacaatctggatatattattaagccccacctccttccagatcgcggaggtagaggtgaggcctaccaaggagagatactcccgcaaggacaatcccgccgtggaactgatcaagaaagtcatagagcataagaacgacaaccgcatcgaggcgaaggacgagtaccaaagcgaggtgtacgagaagctcagcatgtcgctggacgacttcaaccccaatctcgagaagaataagttcctgaagaaattcaagttcatcaagaactatctggatacctcggagttcaacgggaaaccgatcctgacgatctccgtccgtgagacgatctccgaccaatactaccgcaaacatcccaaggcggagaagacgatcaccaaggccaagcgccagcagggtatcgacaagacattggacgatggaggcgccatcaccgccaaccttgaggagatattcaagggcgtcaatatctttgacaacaatatcaatatcttgttgaaccgtttcgtgagcccgttatcttccacgctggccgtctcctattacaaatattatatcatggatacggtggacgtggccggagaccgatgcgtggatctcgccttcgtgcccgtaaacagccagagctacggcttcacgggccgcttgtacatcacgctggacggtaattacgccgtcaagaaattcctcttgaacaccccggcgaacatcaacctcaactgggtggacaagctccggatcgaacaagagttcaagcggatgccggatagtacttgggtgctcgccaacgagaatacctacgttaatttctatatcgtaaaaggggcgcaacagctctatgcccaccagctaaggaatttcgataagtatcagttcgacgtgcagaacgccgactcgatcttcggccttctcggtccgatccatgagctgcccgaagccaccgcccagaccgacaccttctggatacacaaccgccatgtccccttgaaagagaaagagagcgccttggacgacttgctggcgcaactccgcaaggtaccggctttcaacgtgatcatcaagaccgccgagatattgatcaccggttatatcccgaccacggcggacaaggataagagcaagttcgatttcggaccgatgaataccactttcagcgccaaccatctggagggcttccgcatgcgtgtgggaggtatgacgacggcaaacctcaacccgcactggttcggtagcggttatctagcctatggcgtaaacgaccgtaagctaaagtataacgccaagctgacgtatagcgtgaacaagaagaaatatcacgagggagaaagcccggtgaacaatatctccgctatccaagagtacgacgtatatacgcccggtcaagacttcctcttcaccagcaaggataatatgttcgtggcatggaaggtgggcgagcccgtcaccatgatgcaatacatccgcaagaccatgctccagtaccagaaggaatggctgaatggcctgacccttaccacttgggcacgtaacgagaacaacgaggcggccggaacgctccgctacgaccgttacaacgccgacgggacattgacgaacctaaagagtttcaccaacacggagctaggggcccagcttcgtttcgccccgggcgagcgtgcctataacggacgagagggtaagaactcgcttttcaacctctcgaaagacgctcccgtattcaagctatcccatcagatgggattgaagaacgtgttggggggcgacttcaactacaaccatacggagatcagcgccgagaaacggatctggctctcttccttcggacatatcgacgccttggtgacggcgggcaaggtatgggacaaggttcctttccccttgctcatcatgccgaataccaaccagtccatcacgatccagccgcaagccttcaacatgatgcgtgcgctggagttcgtaagcgaccagtatgtttcgttctacttcacgtattatatgaagggatggatcttaaaccgtattcccggcgtgaagtggctacgtttgcgtgaggtgatatcgttcagcggtttctacggaggactgactgataagaacaaccctgccttggacccgacgggactataccgcttccccgagggaacctcgccgatgggccgtacgccttacctggaggccagcgtaggtctggagaacatcttcaagatattacggatcgattattaccgccggttgacgtatctggatcaaccgaatatcaagaaggggggcgtgcgtatagcgctgcggttctccttctaagagttgacagttgagaattgacagttgacagttaaatgtaggagagataagaaaatgggggagttggaacgcagaccgaacgcatgggcgttgacgccgctggtggtattcttattgacttatttggtggtatctatcgtggcgggggatttttataagatgccgataacggtagctttcgtcatctcctcgatcgtagcgatagcgatctccaagggaggcaaattaagcaaccgcatcgagcagttctgtcggggggcggccaacagcaatatcatgctgatggtattgatcttcatcctcgccggggccttcgcgcagaccgccaaggcgatgggtgccgtagacgctaccgtgaatctggcgatgtccatcctgcccggtaacctgttggcggccggaatcttcctagccgcttgcttcatatccatctcggtaggtacgtcggtgggcacgatcgtggccttggccccggtagccgtcggtatagcggacaagacggggatgccggacgcccttatgctgggtgtcgtggtgagcggcgccatgttcggcgataacctgtcgttcatatccgatacgactatcgtagctacccgcacgcagggttgccagatgtccgataagttcaaggtgaatatccgtatcgccctcccgatagcgatcctgaccggattgatatacgtgctggtgggaagcggcgtggagaacgcttacgcccccgccccgatcgaatgggtcaaggtgatcccttatctggtggtgttggtaaccgccgtttgcgggatcaatgtcatgctggtgctattcatcgggatcgtcctgtccggtatcgtaggtctgtggaccggtagctttgatatctggggctggaacgcctccatgggattaggtatcacgaatatgggcgagctgattatcgtgacgcttctggcaggaggcatgttggagatgatccgttataacgggggtatcgactggatcatccgcaagcttacctcccgcatccattcctccaagggagccgagatgagcatagcggccttggtgagcttcgccaacctttgcacggccaacaatacgatcgccctcatcatggccggcccgatcgccaaagatatagcggaccggttcaagatagatccccgccgcagcgccagcctattggatatcttctcttgcttcgtacagggaatcatcccctacggcgcccagatgttgatggccgccggactcgggcatgtctcccctatcgagatcatgcaatatctttactacccgtatctattgggagcaggcgccttattggcgatcgcattcaattatccgaggaaatatacactcgtatagactgcccgtccttacgaaaaaacacaatagtattcaaagcaaaaagactattatgtccgggattgaatactattgtgttcgctgatgaatactactgtgttcaggtgggaacacggtagtgtttgggagcgatgggaataccgctgtcggattagccgaacaaatccagcgtaagctgtttcttcgcggcttccagtttacgaagatgccgcttgccttgaggggtgacgatctccatcttatcgaaacgggtacgtatcaccgtagtcacggtatagctcacgttgaccacctctcctagctccgacagacggcgggcgatctccaagacgcaatcgatgcacataccgctcgtgaatgaaatcttgtcctcgaacatctgtttcttgaaatcctcatcttgcatatagaaatcgatcgtctcgcctcccttgttgtagatacctttccaccgatacttactatctttcagtaccggcgagatgatctctatcgtggccttattatccttgaccgtaggcagatcgtcgctacgcaagataaaataatcgaactggtcccgtttcacctccagcgaaccggaacggttgcgatccttctcgttcaactcacgtaccgagattttcgtcactttcggataccctttcaaagcctcgtagaaattagacttacacttacagaaacggggcgaggcgttcaacaggtcgatcaagcggtgtgaaggcgtagctcccggagtcttcagccgtagttcacggcgtaacttggacagctcacgctgcatctcctcctcgtccgccggcgtacgatccatcagcggttgtccacctaccgacaaggagggacgggtcaatatctgcatcaccaagttcaacacgatagagatagagcggctactctccccggctacccccagcttctcacggaaaccaccctccttatcgtaaggctcgttgtaaaccgtcagcttcacgtccagcatatccgccaaggaacgtatcagcgtaagaatctccttctcacaccggtgcttggtcatggcatccatataattggatttattattaaaggaataacgtatctccagcttattcgcgaattttagaatagagtcactcatttgtttctagtttttcggttcttctttcggtttacgatcaaaaaacgggttcttcgacgaggcgctgaccggtatcgccatcacgcatttacagtctcccaacagtcccaatcgctgggccgccaagccggcgctgaacatgacacgggtatccacacgcaagtccgccgccgtagcgcaagccgagccgatagcgatacccagatcgacggaattaatagcgcacggaaccaagtccggcttctccacgcaggtatcgaaaccgcaatgggcacagttcaagccttgtactttctgggaggtaccgataatcaccacggcgtcggcactctttatattctcggcgtcacggagcaggaacttgaatccggtctcggccgctatccggatcatctcatcggacaagcgcaagatatccccatccgtcaccatcgctatctctatgatatcaatacccttgcctttaggagccgtgcgggcggctgtcatcatgcggcgggcggcctgtaacacaagctcatgcctgatttctctttcgttctgtatcatatccttctaaattcagtgaaacaaaattaagcaaaatatacgaaaccaaggcaaacatatgaggatagaattcataattcaagattagtcatttggtccgtggccttaaagggataagccgggtattcataaatactgaagcgaggctcggtctctccctcgcaataattccagatcgtacggtactcattgacatcctcgcccatctccttcaattgcctaaggtaagcggccacggatttattctccacgatataaacctcacccatttgatcgataatcgggctatgccgacggctcccgtcgtgatcgaacttaagaatccgctttccctcggaagtcaggcctatggtatggaaagtcatgctcttaccaatagcgggcaagttcaatacattacgatccgtacctgcgaacaacaacccgttttccttcaggaaacgaaccaaacgcttgcctaaaggacgttggttacggatcatatcatacaactcagcctgtttctccttcggcacctgcccgaagatcttctcctcacgagcctcttgcaacgagcggctattcggggtgtaaaccgcataattctcccggaatcctttcacggagaacgtataatagcaaaccaccccaagggcgtttaaggtctgccgtaatttcgtcgtatgtcccttacgggaagccgaaaccgtatataccaactgattcgtgatcgtccagcccgccgccaagatcgcctcgatagcgtgcctcgcctccggtgtcacctctagtggagactggaaatgcgtttgtatatagaactggctcacgccgatagcggaagccttctccttgaactccctcaatataccgaccaactcgtcggtcacacgcagcggaagataagctagcaaccgggaacctaaccgtacccgttgcaactcggcgtacttctcgccctccggacggctctcgttcgccttccgtttccgcaccgccatcttatataccgcctccaatatcttacgcaaggtggcgttctggctcatcaaggcatccccgcccgttatcaggatatccctcagttgggcgtcttcctcgaaataacgcatcagacgacgtaacttccggtcccaactctccttaggcttcagagcctcgaaatcgaaattcaaccgctcgctctggaaatcatacatgcgctggcaagaagcgcacaatccaccgcaggcacgccccatcgaatcgggaatcaagatcgccacctccggatacctccggtgtatattatgtccctccggcaatagccaacccgccgcattcggctcatcggcaacgaccatgtcttccttttcccacgccttaatgcttccatacgtatctaccagctcgttcgagtacatgatgtacgatcgcaccgtagcgtcgtcatacccctcatgttctatatttaatagggaaagataataaggagtcacgaaaaagggcatccccttctttttggcacgggccaataagctcatcgtctcgtccgacagggaatatcccaaaaaggagttcaattccgtaggactcttgatcgccatcgacaaatggaaacgagcggtattccaccattcacgtacccgggcctctttctcctcataggagatgccctcggcgaactgaaaacgtgacgaagggctatggcgtctttctatcttcttgatcaagcaagcgatgatacgctccttgttcctctcacggatagcgattacctccgggtcaagcccggtcggccagcggctcatctgccttttcaccaacgcccggtccggtaggatctcaaccggatattccaataaatcaaactgatggtataggtcaatgaataaatcaggagagacctcattttccaaatggccgatcaggaactgccaaagataagtgaccgtccgcaccggaagacgctcgcccgtagacagctcgtccacgaaagtatcatcatgctcaatcaaaagaaggatacgcctcgccaccgccattcctacgttttcttgggtactttccttttccgtgagccaggataaaataagagaacgcaaagcatccttaaaatactttgcgttctcactttcttccgctaaggtcaccaaccaagggaagctctggttatatacttttttcagtttagaaatgtcggatacaagatgttctttttttatcataagcatgtcatttttgtagattagaatacatttgtaaagcgtcctcttgacgattttctacaaaaataacaaaaaatacggcaaaatgccgtttatacaaatctaaaacatcttaataaatccttaccatacgattgacggacaatactgcgatatcgtatttttcaatacctttagattgatcggcttcgtgataaaaccggaagccccggcttctttagcggcttccatatcagagtcgaatacataagccgactgcatgattacggggatatctttcgatagcttacggatttccttcaaggactcgatacccgtcatctcaggcatctttatatccatcaagatcaagtccacctcgttttccttaaagagagccaaagcttccaaaccagttttagcacggatcaaattacaatatttatgtaaaatggtcttcagaagtaaataattactttcctcatcctccgcgattagcaacgtgggctttcctccacccaaatcatttttcacatccatatatataacgttttattcttttaatcaaaatcaaataaactctgatgaagcaaagataaaacaaatattagaaagtagacataaaattcaaggagatatgagtattcggggaagttctttttccacccatgctagaaagttacgtctatacctcccataaatatcgccttcggcatcgggaatccttcgttgatagaataacgggtagccgttaaattctctcctttgacaaatagattcaagcctttatcacgtgtaccgaaacggtaggctgccttcgcgttcaaaaccgtgtaatcctctttcaccttgtccgccgtattgatataaaggtcgaaaatggattgtacgttcacgttgaaagtgaaacgtcccggggcatacatcacgccagcgaaaaacttatgcgccggagccgccagcagggccttgctcgtatgcaaatagctatagttcatatcgaggctcaaattcttgagaatctggtaacgggaatcgaactcgatacctttattcgtaaaagtacccgtattgacattcttaggccgtccgtctatacgtgtcgtctcgatcatatcctgcccgtcgataaaaaaggcagtcaactccgtaaacaagttgccgtccaaaaatgtctgcccgatggatacctcgtagttcatcatgcgctccggtttcaaatctgggttctgaggcgggaacatgtacatctctcgtatattcggactccggaagcctttcgacaaagaagcctttatcacgttcccctcgaacggacgtaccgtgaagccggcctgcggaatccactcgccgccgaagatactgttatgctcataacgaaccccggcgttcaagcttaccttgtcaaatagatcctgctgcatgataacgtatccggctacctcgttcacggtcttattcaccaactcattctggttaccattgatactatcctgccatgcgtgaccaccccagttcttataatcgatgccgaccgtaaaactattccctttcaccaagcggaaagactgataaagcaagaaacccgcattatgatcgtccgaataaaacagataaggattaggcgtcccgcccggattatacccatcatcaatcttatgatggccccagttgtagaaagcacgaagggcaccacttgtcttcccgtaattattctctaaagcgaaggaggtagtacctcgcaggatattcatgatattatcgataagcggatttgttatctctcccgggttctggttcttgaacttagctaagcttacgtctcccgtcaccttataatgatcatcaatcttatatcctaacttagcgaaaccattcgtgatatgaaacttcgaatccggacgatgtccatctgtgcggtcatgattcaaggagatataactactaaagttaccgatattgtacccattattaatcatatacttctgggtgttatacgagccgtacatgatacgggcttgcgtacgccgtcccggctgattatgctggcgggtgatgatattcacgacacctcccatagcgttcgagccgtataacaaggaacccggaccacggatcacctccaccttttccacgtccgaagccacataggtatccggaagcgaatggccgaatagaccggcccattgaggctgtccatcgaacaacatcaagaccttattaccctgtccgaccccccggatattaaccgtcccggccgctccctcggaaacgccgaaacctgtgatccctttttccgtgacaaacagcccgggtactcgctccgacaatacgggaagcaacgccgattcactgctagcctcaatctcctcccgttcgatgaccgagatagataacggcacactgttccggttcacatggatcttgttggcggaaactaccacccctttcaaattgatcagactgtcaatctctaccggatctatcgcgaatgccatggagcttaccaatagtccggaaactagtaaaagttcttttctcatatactacttatatctatactatttatcattttaaacatcccttagtggcacgtctgccaaaaaacgtgttaccaaaccttcaaaaaaaagcattaatccgcccggctcatcaccaacttaccatgcttaatgcctttgattgtcgtcaacttatccgacaattccgtcaagcggtgggccgttcccatcaccgtcactatatgcaagcaaaaattctgattgatataatactgggaagacgacaagatcacatccttataattttgttggatacccgtgatcttcaaagagatctctttcttgacttggtcatacataatcacgatcgtcccggctacgatatggttgcattgccatttacgttcggctacattcttctctatcagaaaacgaatcgcctgcgaacgattggcgaagccattctcattcacatattgatccaatgattccaacagattgtcttccaaagagacaccgaaacgttttaaagacataaaacctttttttataattttcggtaccaaaggtagtgttttttcaagaatctcggtattctatcggcaggaagaggaaaaattagtcgctaatcacgaaaattcactccagtatcccaccataagcgagtacctccggtatccggacctcccagatactcacacaaggcggaatattgagccgggttaccggaaataatgctaaccgggaaattcaaacgacgaatcatcgttcgcgtatcgatctttccattgcttttattcaccaaaaccgggaacaaacggggataaccggtacgcctctgctccgcccaagcctcacagccctcggggtaacaagcgatccatttttgggtaatgatcttctccagcttggtctccctagaggcttcttcatcccatgccggagacaccaagcaaagcgccttcgccgaatattcgggagtaaacgtatccacgaaatcggcggctacaagatcactccgcaaataagtattggcctctcctaccctccattgattgaacgatgatcgtacgccttgctcatagcaagtcccggcatcctccccggaccagcctctcaaggctgcctccgcacgtaagaaccaaacttccgcgggcgtcattaatatagcgtccgttttctgggtaatcgtgcttctcgaatgctcactatagcgggaatgattaaatcctgtcccttgccggattccccggtactccccggaatatccctgtccggtagcaggctcaaaataacaggataaccgagggtctttatatcctttaaggatcgattccatattagcgttcataaaaacctctccccacgccttattgatctcccctagcggattcgagtagccggttccggcggtagaaaccgcgacgacctcataagcctcctccagcaaaccggctggatgtgtcagcgacttatgcgcctcatcccttgccttatcagggtcggccatagcgatacgaaccgccaagcgcaaacgtaatgagttggcgaaacgcatccattccccaaacgtcctgtaattctccggcataatcatatcgaaacgagaaaaggtttcctctccatcatattcagacagcaagtgaatagcctcccccaaatcccggaaaaaagcataataagcgtctttctgggaatccggcattaccccggcatccgactccccgaacttcgtatacacgatcgggccataataatccgagatccgatgcatgacctctactttcagtattttagcgatcgcatagaaagccggatatttatcacgggaatgatcttccgtctgctttatctccgtcatgatatatccatacgtattatcccacatcgtgccattccagccatcctgcaaattatagaccgtatttcccaatccggcgttgaagggtttaaaatcatgcatataaccggaaaacatatccgcattcagattttgcatcgtttggaaatgccagttcttaccattcccccaatcataattaaaataaatccccatctggactacttttaaccagacaccgaacgtattataatcatacgttttctgctcgtcagtaaaccccgtactatcggtattatactcctcgaatttacccgtacaagaaaaaaggagtaatacgaccaacagacttgccatttcattcagaaatcttgtcttcatacacttagaatgaaagtttcacattaaagccaacacttctcgtagtcggtatcccgaatatatcgatcccttgattactattactcaccgaaagtatggcatccggatcaaatggagcctttttataaataaagaatagattccgggcgacaaaagacagttccgcctttttaacaaattgttttcttcccaacaatctcttcggtagcgtatatcccaaagataactctcgcaaacggatattggtagcattgtacatataatattcggtcacgccgtttcgtcctcccacctgctcataaaatccttttatgttataaatatgatgcccttccaaatccacataccccatcgtacgggcctctccagaaaccttactcactcctatttggtcaagcacagcctgcgtctgggccaatacctctcccccaaaatgcccgtctatcaggaaatagtatgagaaatccttatacgtgaaactattcccccaacccaataggaacgccggattgcaattccccaccttaaccgtattcccgctaccgatctcttggggcaaaccgtcccggccatacacgatcgcaccatatttatcccgctcaaaagctttcccatagatatcgccaaacgaaccaccttccaccaaacgcatcgcatagctagaagagaacccttcgtttccttgaataaagctagccaaatcatcgtgcagtttttttacctcatttttattccgagaaaagttgagtgtcgtattccatttaaactggttcgttaatatgggaaccgcacctagcgtcaattctactcccatattctgtatatttcccgcattcacaaaataatacttgtaagcggctccagcggaagaaggcaaagaaaagagttgctctttcgtgttggtcttataaaacgtaagatccacgtccatacgataatcaaagaatttccattcagtacctatctcaaaagagctgctcatctccggcttcaaggtaccgaacggagccgtatcattcggctggggaatcccgcccgctgcgatatggcctaccgtattgctaacgaataaaggtatatcattacccaccttactccaagaagcccgtactttccaaaaagatatcaaggaaggcatcgagaaggatttagggataatccaagaaagaccgactgaaggatagaaaaaacctcttgatttacgttccgtaaacgcaagggtagatgaccagtcattacgtacggtcacatctaagtaaaggctttccttatatcccaactgcgccatagcaaaaaaggattgcatttgccggcgtgcgtcatccgactcctcgatgtaggcactggacgacatgttaatattagcaatcgtaaagacattcggataatacaaggaagccgttttcgaatccagcctcaacgcactggtgcgtgtgtccgttatgctcgtaccgatagcggcgttcaaggagaaatcatcccagcttttattcaatttggccatcaaatccccatagagcaacgtagtctggcaggtgtaataaatgtaacgcccgttctcaccggcgatacccggagaggtagaagcgtatatttcctgctgatacttatcattcacataatcgatatttccacggccctgtaacgtaagccaatctgtcaccttgaaactagcggaagccaacgccaacacacgggcacgtttatcctcgttttccgtacggttgaccaaccaataaggattttgctcaaaatcagtaatcgtagtataccagttctggacgttcatattccgtttctcgttatatacctcaaagttctccttataaggcgccatatccatccctctaggaaacgtgtataaaccttgtaacgggttcatataaaatcccccgaccgtaggtttccctttgattgtttggagtatcaagtttgcctgcccctccaagatcaaacgatcatcaaagaaagaagaactttcacggagattaaaattatgcttgcttaaattattcttaggaacaatgccccgtgcggtcgtattggcatacgagaaataattttgcacatggctattccctgccgtaaatatcaatgagttaatagcggtaatacccgtccggaaaaaatcgccgacagggtcatagaccggaagagaagcccggtctccccaacaagtttccgccccttccagccgtccaaactcattctgaaacttggggagactgatcgcttgatcgacagtcagcgacgaggagaaatgaatattccgtaccccggccttaccttttttcgttttgatcaagatcacaccgttcgccgcttgtcccccatacaacgcagaggccgaagcccctttcaagacactcaaactctctatatcatcgggatttaaattagagatattatctcccgcatctcgattaccggcatcagctgcacctccaatcgccgtcgaggtttgctcactgctaacacacaagatagggacaccatccattacatacaaaggttgattatttccggatacagaacgacttcctcgaataatcactcgagaagagctagccagaccagcggaagtccgatttatctgaagacctgccatctttcccgaaagcgtactcataaaattaaaatccttggtccttactaattcctctccagagatcaattgagtgacataaggtaaagaagatccctttttttcgataccaagagccgtaacaaccacctcgtctagaatccgagtatcatcttccagctgaacattcaaaaataattgcccctcatactcaatttctcgtgaacgataaccaatataagaaaaaactaaagtagtctccttaggaagctccaagacaaaacgaccatccacatccgtaatcgtaccgttctttgttcccttctccaccacattcacgcaggcaataggctctccttcgtgatcagtcacgataccttttatcttaccatccaatttttgttgtatctgaattattgtctcttttttactcaaaataatctggtcattcataactgtatagacaatcgtcctatccttaaacaataaatttaaaatctcaaaaaccgtacgtccagataaagggctacgcaacttctcggataaattgatcactcgagcatcataaataaaagaataattggtttggctctcgatctcatctaaggcttccgccaagctaacagaagctgaaatatgaatataagattctgcatattcctgttgggcatctagtgggaataaacataataacaatagagagaatacactaatacacaatctcataattcaacaaagattaaatgataaaaaatactcttatcgtcatgctcatagtgaacaaagttacagaaattttcattatggcaaataaattccgctaaattttcaataccacatccatcaaaccacaaggatttcaaatatttacgcacaaaactatgtaaacatatactcatcaaaacatatcgtataactgattcatgaagcgatgaaaacaagttgtggtacaaacaaagcccccagtcaacgtcataggcagtgtcctgctacatatatgctgcactcagcggaagtaattgattaaagcaataaaatcatctagtattacacttaaaaaaactctttatatataagtataaagattaaagcttcagattaaaaagaggatgcatgaggcatcctctttttataaccaattcattacaaagtgatattagaaggtatttgatctaaatcataatagtcatgaactatcttatccggatataccttaacaattcgaataccaattcgatcttcccccaaaggagtacaaatagaatttgttattgtaatattgaaatttccataagaactcatcgcattataatgtaaatgtccagcaaacatattacttactcgatatttatccataagatctaagtatattttccgtttttttatgggaatattctcatatctatttgtctcattaggctctttcacaaagaaaggataatgtccaaaaaggatacgatgattacatttctgagagttctctagatttttctccaaccagaccagttgttttttttctttttcttctctatttgcaaaaataataggagtatttaatccaataaaacaactattatttaaatgaaagcaaaaacaatcatatccatattcatccatataacaagaaatagactcatctgtactctgttgatttaaatcatgattacctggtaacacataaacagggatgtttttttttatcaaagtacaaattcgtttaaattcgttaatttgattttgatcttcaccatcatttaccatatcacccgttataaccacaaatgccggattcaaattattaataacagcaacaaccttttccatgatttttgtctcttgagagaaacttttattcttttctaacattccaaactgaggatctgataattgaataaaataaaaaggttcagactgagcaaaagtttttgtaacacaaaaaatcacagtaactagatacaccaataatctactcataatataatattttaattaatatcttcatactgaagtaatacagaattcgcctattcctttattttgaagatgtgcaatagttggaattcttatcccaccacaacggagtagatacaatatcgcctttaccacctaacatggatttgcctttctcgtactcagtggcattaatcaaactttcctttgttggatacctcattcgtttaataaaattagctgacttcaagatatccttatcattattattgtaaacagcttgatctcgatagacagcaacatccaaacggggtaaatttaaacgacgtttatcattccaaccttcttgcgccaaatcaggtatcccagcgatatatttctgagtaatgatcttttccaaagctgtatttcccgcaccttgttgatcatcatatctagcacttgtaccagcctcatttttctctgtagaagtcaggtagtcgtccacctcagaagtaaccccccaagtagcgaaagacgcacgaacacctgcctcatattccgatttagcatcaccagcgataaaaccacgagcatataattcagccttcaaaaaatgaacctcttcagaaaggaacaaatcatacggacgagatttatagggatagccatccttaataataaagccaagctcagcacattgtttcgattgataaattccggtattggcttcctctgccttaggtccatataccaaacctttccaatctccattctcaatacccggctggaaaatcttcggggcacgaggatctaccttttccggatgtacgctagaaaccgcaacaccggacgtctggttcactacaccttgaggccaagcgacaccaccgatattagtcaccagtttctcaaccgattttgacatacaaatcggaccactccatgtaatctggaacatcgtataattgtaatcctgtccccaagagccatcagccttcggtggcatataagcgttatcagccttatccgagatcaaccctgctggtgatgaaatagcggcatttgcctcagctatacatttctcctgatccacttctgtcaaacgaacagccaaacgcagacgcaaggaattggcaaaacgtttccacttcgatacatcattcttataaatcaagtcgatacccgcatcagaaaaaataggttgcgcactatcgttaaagccatttatggcagcatcaagttccctgaagtactcgtcatagatatccttcaacgatttataaggaggattcgcctctacaatctcataagcagggaaaggcatcgggccaaatttatcggcagccagcgtatgcacatatacacgccatatccgggcgaaagcaatcgtattcgcataagcatccttatccttttccgtcagactacggatcactatattaatagaggcgatctgtttcaaatattcttcccaaacgagattattccattcatcgtcttgaatatagttcttggtaccccatccaccaccatcgacagtcatctgggaataaaaatcaatctgtaatggtttcaaacgttgttccacgttaccttcgatgatcaagccaccacgcaatgtagaggctagacggggttcgttcatattatagttcacgtcgtctgttggtttatccggattctcatttatacccgtcaagtcgcaactagttgcacttagcatcattaacgaacaagctgttaatatctttatactcttcataataattctatttttagatttatgtttctttaaaaagccagattaatattaaaacctaagcttctcattgtcggcatagaaccgtactcaataccttgggcgttaccggatgtataagcagcttccgggtcaaagccctttgtcttactatagatcatgaataagttacgagccacgaaactcaaacgtgcggcggtaaatggagtcttagccaacatggttctcgggaaattatagcctagattcaattcacgtaaacgaatatttgtagcgtcatacatataagcttctgtattatttgaaacaccattccaataagcctgagaagttatactctttgtattcggggaaccgtccaccaatacacccggaactaccataccgtcacgaccatccaacgtcatctctaagttaccagatgaagcacccgcacggatagatcccatatacacatcaccgccataacgcatatcgaacatgaagctcaacacgaaattcctataagacaaggtattactccaacccatcatccatttcggttggttattacccaatagttccatgtcactcgtacgcaaaggcacaccatcctcaccgatgataacattacctttgtcatcacgttgataagcatagccatagatatcaccgtaagcacctccttcatgagccacaatcttcaagaaagtaaccgacttatcacttagaatctgctctttcgtatcctccgtcaatgaaacgaccttattattattttttgaccaattcaattgagtatcccattggaacccgttttccgtaatcactggggtagcattcactgcaatctcgacacccttattctcaatattaccggcgttaatcattttctttttaaatccagttgcggagggaacatcaatttttatgatctgatccttcgcattctttttatagtaagctacgtcgacaccaaccctattctcaaacgccttcaactcaaggcctaactcccaagagttgatcgtctcattctttaaatttggatttgccatccaatcctcgttgctggcattaaaaataccccctttaatatcataactgatattataatagtcacgcaacatataagcgtccgtatcattacctacctgagcccaagacgcacggatcttaccgaaagaaagaatacccgtgttatgccccatcttattcaacatttgggtgaaaatccagctaacacctaccgacgggtagaaataagagtcattgtcttttggaagtgttgaagaccagtcgttacgagcagttaagtccaaatacaaatagtcgtcccaagacaatgatgccgtagcatatagcgagttgatttgtttacggttgcgagtatactcaccaccatgtgtcttaccgttggcgatcgcatggaaatcgggaatcacaaactcaccggatgattccttgtaccatgtagaattacggtacatcatattaccacctaccgtacctacgataccgaatcgatcccagttgcctttagctgtcaataagaaatcggagttgatctcggtgaatttctccatattggcagtcatgctaccgttgttctcccaatacgggttacctgtcgcacgaatcgtctcatactggatggtgtaattatccataccagagcgaagcttcaagctcaaccaatccgtaaacgtgaaatccaaggccgcgaatccgataaagcggtctttcttatccttgttcgtattgcggtaagcggaccaatacgggttattggcgttggctcccgtgtcgatcagataaccagcgggctttccgtccgcacgtttccaatcattatctttataggcgtcatagtcagagaagcccacacttcggggcatacttaaatagttaaggaagatattatccgggtcgcccgctaatttcacacggttgttcgtatgctggcttacataattgaccttcacgtcagccgataaccatttagacagcttagccgtagaacgcaaattaatagacgtacgatccattccgctattcgggacaacccccttattatccaagcgtgtcacaccggcacggaaagtgatatcctcggagctcttactcaaatccacgctattcgtccaagtggtaccagtgcgcaaaaagtccttgtacagattattatctctagccgcatagggatgagatcccatcgccatatccttaggagaaccatccataacggcaccccaactcgtcgctttattattatcgaaagcgccgtcgataccttgtccgtatacatcttggaacttcggagtttgcatcgggttctcagccgtgaaattcgaattgatacttacgccccaacctttattctggctacctttcttagtcgtgatcatcacgacaccgttacctgcacggctaccatacaacgccgcggctgccgggcctttcaatacggacatactctcgatatcatctggggagatatcagagataccggaacctttatccacgttaccgttaccccaatagtcatccgtaccaccgctaaagttatcgataggtacaccgtccacaacaatcaacggctggttattaccagtaatagagttattaccacgaatcacgatacgagaggaaccaccgacaccggtaccattttgcttgatctgcaaaccagctaccttaccagccaaagcgttggccacgttagcatcacgggtttgcgtcagggactcacctttcaattcagacatagaatatcccaaagcctttttctcacgcttgatacccaaagcggttaccacgacttcatccaaggcttgcgtatcatcgaccaattgaacctcgatagaaggttgtccggtaaagacgatctcttgcgtattaaagccgatataggaaacttgtaaagtcgcattgttaggaacatccaactcgaaacggccatccatatccgtgatggtaccgttggtagttcctttgacaattacgttagcaccgataatagcctcgcccgttttgtccgtaacgacaccgactgcttttcgtgtctgttgttgagcgtttaagactgtgacttcatgcgtgttctctgcgaaaaccatggccggtaccaaacagaatgcgcatacccccatgttgatcattaacggaatttttcgaaaaagagaataactattcccccttaaagcatttaaggttacaattttattcatatttttgtagtgttactatttataataaagttatttgtagctgcgccaacagctcttcttgacttttcgtacgggagaatacgccaatattcttccgtatgtttttaatccttgtttattctttcttcatgggcagacgtattttagaaggttacacattatttctcattttgatatttccacgactgaggttcccgatccactgtccttaacggtaggtttatgtatcgcatactggattcccgacgccaatttcaggtattccaatacttgaggcaattgctcgtccttgaaacgggctgttattatggacttcagtatctcgttatcttttacctcgaatactacgtgataatgacgttccagcgttttcaatactttatccatcggatggttcctgaagataatctccccgttcttccaagccgtgtcatattcggtattcacgtcgaacaccttgatcttgccagcgcccttttgatactcggctttctcgtttggcttcaacatctgtgtcattcgctttcctccggacacgacgttcagctttaccgatccctctaccaaggtggtctctatcatactctcgtctttgtaagcggatacattgaaagaagtacccaacacctctaccgagtaatctttatccgctttcacaataaaaggcttatgagcattcttcgtcacctcgaaatatccttgtccggttaattccaccgtacgggtatccgcattgaagtccgaaggatatctcaattcgctattggcattcagccaaaccttagaaccgtcaggtaaatcgaatgccgaaaccaccccaggattcgtgcgtacggctagcgtacgcacgttcccttgaccctgctgtatgaacaaataagcggataaaagaaagactggaatgaataacacggccgcagcccgttgaataacacctaacacttgtcttaaagctaatcttttctctttcttatgaattcttgatttaaaacgagacaacgcctcgtccgggttcacggtccgcatgacttttaggcgacttgccacttgagctgtaaaatagacctgctccaacagtttctcgttttctagagaggcggcccgccagtttttcacctccgcagcttcctcctcggtcaacatcccatcgatgtatcggatcaatatgtcttcgtttatttccattttttcttgtttctataattaatacagttgagacaaaagatgtactaaacaaaaaaacgatttttttcaagaaaattgaataatggcaaaaataccgttcctaaagaaaggctcaacaatatccctctttctactgttttaccacaaaatgagacttctaatggtaaagattcttttaaaacggatttatgaggagccaagtgaggcggatggttatcgcattcttctcgacaggctatggcccagaggactgaagaaagaggatgcgaagtttgacgaatggagaaaagacatcactccatccaaggagttacgccaatggttccacgaggataaagacaggcattgggaagtattccaaggtcgctacgggatggagatcaagcagaacccggatttcattcctttcttacgagagatcgagaagcatccggttgtcactttcctcacggcagcgaaggatgtacaacatagtcatctacctatattaaaagaagtcatcgaggatttcgaaaaaaacaaatcataaaaataaaaagacctatgaaaagtatcgtattgcttcgccacggcgaaagtatatggaataaagagaaccggttcaccggttggaccgatgtggatttgacagaaaaaggcgtggccgaagcttatagggccggcaacctattgaaagaaaaaggatatgtgttcaataaagcctatacctcttatttaaaacgggccgtcaaaaccttgaattgtgtattggatcgcatggaccaagactggatcccggtggagaagagctggaggctgaacgagaaacattacggatcgctacaagggttgaacaagagcgagaccgcccaaaagtatggagacgagcaggtcttgatctggcgtcgcagttacgatatagccccgcttcccctatcggaagacgaccctcgtaaccctcgcttcgatatccgctacaaagacgtgccggataaagagttgccccgtacggaatccttgaaagatacggttgagcggattctcccttattggaaagaggttatcttcccgacgctccggaccgccgaccagatccttgtcgccgctcacggaaacagcttgcggggaatcatcaaatatttaaaaaacatctccgatgaagagatcgttcatctgaatctcccaacagccgttccatacgtgttcgagttcgatgatgacttaaaactcgtgaatgattatttccttggcgacccggaggaaatcaagaaactcatggaagccgtagccaaccaaggaaagaaaaagtagcgggattcatgcctcttatccggaattattcattaagtttgcaaccaaacaaacttaaacactattgtggacgagaacgcagaacgaatttcactagaacttatcgcaggagacgaacaagcgttcgacaccgtgtacaaacaatattaccggggattgtgcgccttcgcctcccaatatgtaacagtaccagaatcggaggagatcgtacaagacgtgatgatgtggctgtgggaaaaccgaaaatccctagtagcggacatgtccctgaaatcactcctcttcaccattgtccgcaataaatgcctcaatacgatcagccacatacaggttaagcaacaagtgcacgagagattgtacgccaagttccaagagcaattcgagaatcctgatttttatataggagaactgatggccttggcctccaaggccatccgggagctcccggatgaataccgtaaggcattcgagatgaaccgtttcgaggaaatgacctacaacgagatcgccgagcggacaggcgtatcccccaaaacaatcgcataccgcatctctcaagcgctcaagatattacggacgaaattaaaggactatatccctttattggtatggctgctttacgaacaaacacgctcataacggaggaagcatcctaccgccatgagcgtttttttaatgagtcaaaagacttatttcacgaacggtgctttcaataaataatccacgcagcctttcacgccctcaaactgggaacgtccgtcaggcataccctccaactccacgaaataatccttgattccattcgcgtaagcttgccggaatatattctcgaaattcatcatcccggactcgcctagaatagcacggtccttgatgtgcaataccttaatacggttcggatatttcttcaaccactctatcggatcttgttgtcccatcacggcccaataaacatccatctcgaaaaatacaagcgaaggatcagtattcttcaagaacaactcatagatgcaatctcctttcacacgccttcccagcttggcctccgtactacccggatttaccttggcgaactccatctcatggttgtgatagccgaaaggaataccggccgctttcactatcttacccgcctcgttaaaaatctcgcagacgaaagcggtttcctcggtgctacgggtactcggttgcccgggctggatcaagtacttcacgcctagtttggcatggtcatcagccgtcttcttccaatactcggagatctgggagcgattggccttcgtgtactcacgtaccggaggattcacgtgggaactggtgatcttcaatccggcatcatccaccatcttcttgaattccatcatgtctacaccgccgatcttgccttccttgtaaccggccaattccagattcgtgtaccccatttgcttgatctttttcaatccaccgggtacatccgcataaagttccttgcctaaagaatagatttgtaaaccaactgtcttagcggccatcgtctcagtagtgacaggtttagccgcatctgcgctcccgacctttccggccatcaggccacccaaggtgaaaagggacgcgttctttaaaaaatctcgtctatttatcatgattattagaattaagtcagtccaaagatagagattataatctaaaaaaagaccgcataggatggaaaaatccacctatacggtccacaaatggtatacattatataataggactcaattaacggcgaggcttgatatccaacttcaccggcttgatcatattctccgggcttaagatcgtatccaattcctccttggtcaagataccatgatccagtaccaattgataaacgctaacaccggtctccaacgcctccttcgcgatcttggtcgagttcttatagccgattaccggattcaaggccgtcaccacgccgatgctatgatgtacctcctcacggcaacgatcctcgttagcgacaataccgtccacgcaacgggtacgcaaggtatcgaaaccattgatcagcaaatccacggactcgaagcagcattgtgccatcaccggctccatggcgttcagctccatctgggcggcttccccggccatggtcacacataattcattacccattaccttataagcgatctggttcatcacctccgggatcacaggattcaccttacccggcatgatagaagaacccggctgcatagcaggcaagttaaactcacccaaaccgcaacgagggccgcttgccaacaagcgaaggtcattacatatcttattcatcttcacgcaaacccgcttcatggcggaagcatagcctaccaagcaagaagtatccgaggtagctcctaccaaatcggaggagagacggatatcccatccggttatctcacgtaaagccgcgatacatttctccgcgtatcccggctcggcacaaatacccgtaccgatagcggtagctcccatattaaccaccaagaaatcggcggcggcctcattcaagtgagcgatctcatcctgcaagatgctggcgaagccattaaaggtctgccccaacgtcataggtacggcatcctccaactgcgtacgtcccatcttgataatttgcgagaactcctcccctttcttacggaaagaggcgatcaattcctccaaatggggaagcaattgaagatgcttaaaatacataccgatatggatagcggtcggatatgcgtcgttcgtggattgcgagcagttcacatggtcgttcggtgagcagtattggtattcacctcgctcatgccccatcagctccaaggcacggttggcgatcacctcattcgcgttcatattcgtagtggtacccgctccgccttggatcatatccaccgggaactggtcgtgatgcttgccatcgataatctccccgcaagcggcgatgatagcgtccttttgctctacggtaagcaagcctagttcaaagttagccatggcagccgccatttttgttatagctaatcctttaatgaataaaggatattcgctcaaacggaatttactgattgagaaattctcgattcctctcaaggtttgaactccgtataatgcttcggcggggatttcacgagcgccgatcaaatcgctctctatgcgagtttttccagttaatttagtatccatattagaaatattaatcgttttttattgtttccgcaaaggtagaaactattattttgaaagcaaattattcttcgaaataataaaaacaaataccaaaaacgccaatacacgtctacacaaggctcaatgaattacaatttgtcaatagagcagttttaatagaccttctgatcttttttatctcattcataaaaaaagcacgattttatttgctgtttgtcaaagattccatatatttgctgccgtaataacaaaacagagtcatgagaacattcgtagtaaatacatattggtggtggcgctccgtacaactcaaaaggtcgtaaggaacgaagactcgtatgtatatataaacactacataaagatataaagaggtctgtcgcacttgcggcaggcctcttttccttttatagcaaattcaaaaggaaaataactaaaatagataaaagatgaaaacgtatcaagttgacaagaatggttactatggtgagttcggcggagcctatgttcccgagatccttcatcaatgcgtggaaaatttacagaatacctatctgcaagtgttggagagcgatagcttcaaggaagagttcgatcagttattgcgtgattatgtaggccgcccctcccctctttacttggccaaacggttgagcgagaaatacggatgtaagatctatttgaaacgggaagacttgaaccataccggagcacataagatcaacaatacgatcggccagatcctcctagcccgccgcatggggaagagccgtatcatcgccgagacgggtgccggacagcatggagtggctacggctacggtatgtgccttgatgaatatggaatgtatcgtttatatggggaagacagacgtggaacgccaacatgccaacgtacagaagatggagatgctgggagctaccgtcgtgcccgtgacctcgggaaacatgaccttgaaagacgccacgaacgaggcgatccgtgactggtgctgtcatccttcggatacgtattatattatcggttctacggtaggcccccatccttatccggatatggtagcccggctgcaatccgttatcagcgaggagatcaagaagcaactgctggagaaggaaggaagggatcacccggattacctgatcgcctgcgtaggcgggggaagtaacgccgccggtacgatctatcatttcgtggacgacgagcgggtgaagatcgtcttggccgaggccggcggcaagggcatccactccggcatgagcgccgccacgatccaattgggtaaagagggcatcatccacggggcacgtaccttggtcatgcagaacgaggacggacagatcgaggaaccttattctgtttccgccggcttggattacccgggcatcggcccgatccatgcgaacctctccgtaaagcaccgtgcgcaaatcctagcggtcgatgatgacgaggcgttggaggctgctttcgagttgacccgtttggaaggaatcatcccggccttggaaagcgcccatgccttgggagccttggccaaggtaaacttcaagccggaagaggtggtggtactgactgtctcgggccgtggcgataaagatatggacacttacattaattataaattgagaattgaaaattgaaaattatatgatggattatacctttaggacaataagcaagaaggtgatgggcgaccttcacactcccgtaagcatctatctgaaggtgcgggatatctacccggaatcggccctgttggaaagctcagactttcacggaaacgagaatagcctttcctttatagcgctccgccccttggcgagcatcggtatcaacaacggggaatgcacggcgaccttccccgacgagacccgtgaggttaccccgctcaccgaagactataacgtacccgaggcgatgaacgcattcctcggccgcttcaaggtggagggagcggacaagaaagtctgcggattattcggttacacggctttcgatgccgtccgttatttcgagaacatcccggtcatggaagttcatcacgaggagaacgacgcccccgatatgctatacatattatataagtatatccttgtcttcaatcatttcaagaacgagctgaccctagtggagatgctccaagaggacgaggctagccggctggaagaaatcgagacattgatagagaatcgtaacttcgcctcctacaacttccagacagcgggtcccgagacctccccgatcaccggcgaggaatacaaggcgatggtccgccaaggcatcaagcactgcctcaggggggatgtcttccagatcgtattgagccgtcgcttcgagcaaccgttcaagggagacgacttcaaggtgtaccgggctcttcgcagtatcaacccctctccttatttgttctatttcgatttcggaggtttccgtatcttcggctcttcccccgagacgcattgcaaggtaacgggcagacacgccagcatcgacccgatcgccgggaccgctttccgtaccggtaatatcgaggtagacaaacaacgtaccgaggccctgctagccgaccccaaggagaacgccgagcacgtgatgctggtagacctcgcccgcaacgacctaagccggaacgcccacgacgtgcaagtggatttctataaggaggtacaatactacagccacgtcatccacctcgtatcccgtgtgagcggcgagatcaacgccgatagcgacccggtaaagacctacgtcgataccttccccgccggcacgttgagcggagcccccaaagtacgggccatgcaactgatcaccgacatcgagcatcataaccggggtgcttacggcggctgtatcggctttatcggtctggatggtgatttgaaccaagcgatcacgatccgtaccttcgtcagccgtggcaacgtactttactatcaggcgggagccgggatcgtggctaagagcaacgatgagcgtgaattgcaagaggtaaacaataagctgggagccttgaagaaggcgatagatctagcggagaaattaatcaattgattatccggttgtagagacggggcgtgccccgtctcccacagtctgatagtattttaagttaccattttgaaaggatgagacggggcacgccccgtctctacaacaacaacaatatatataaaatgaagatattattatttgataattacgattccttcacctacaatttgctacatatattgaaggaactgggtgcggatgtagaggtacaccgcaacgacaagatctccttggaagagatagagcgtttcgataagatcttactatccccgggaccgggcatccccgaggaagccggcatcctcctccccttgatccgccggtacgccccgacaaagagcatcctaggtgtctgcctaggcgagcaggccatcggcgaggcattcggcgccacattgataaaccttaccgacgtgcatcacggcgtttgctccgatatacggattgtcgctaaagatcctatcttcgagggactggaaccgggtatacgtgttgggcgttatcattcttgggcggtctccaaggaaaacttcccggattgtctggaaattacggcggtcgatacggaagaaggacagatcatgggcttgcgccatcgtgagtacgatgtacgaggtatccaattccatccggaatccgtgttgacacccaaagggaagacaattatagagaactggctgaaacgctaattacctcctaaggcacttatagtttcttcctaacgaaacatcagtttctctatggtgaaactaatgtttctcaagcaagaaacaagagttttcccctagagaaacaaaagtttttcgataaagaaatatcgcaaaactgcaatattttatcattcaacacattacagacatgaagcaaatattatacagattattcgagcaccaatatctaggccgggaagaagcccggaatatcctccagaatatagcggagggacgctacaacgattcccagatcgccagtctgatcaccgtattcctgatgcgcagtatctccgtagaggaattgaccggattccgggaagctttgctggagatgcgtgtaccggtagatttaagcgaatacaaaccgatcgatatcgtaggtaccggaggcgacgggaaaaacacgttcaacatcagtacctgttcctgtttcgtagtggccggtgccggttacaatgtcgtaaagcacggtaactacggggctacctcggtgagcggtgccagcaacgtgatggagcaacacggcgtaaaattcacgaacgatatcgataagctacgtacctccatggatacctgccatatcgcctacctccacgcccccttgttcaacccggcgctgaaagcggtagctccggtacggaagagcctcggcgtgcgcagcttcttcaatatgctcggcccgctggtcaacccggtcatgcctacttaccaattgttaggcgtatataacctcccgctactccgcctatataattatacgtatcaagagagtggtacccgtttcgccgtggtacatagcttggacggttacgacgagatctccctcacggccgatttcaaggtagccatgccggagaaagagaagctttataccccggagatgctcggattcaaacgttgcacggaagcggacctcgatggcggagagaccccggaggaagcggcccgtatcttcgacgccgtattagggaacagggctaccgaggcccaaaagagctgcgtgatcgccaactccgctttcgccatccaagtgatctgtccagagaagaagatcgagacatgtatcgccgaggcacgtgaatcattggaaagcggaaaagcattggccacattccgtaaatttatatctttgaaccaaagataaagaaacatatcctatgaaaaaggacatcttacaagatattatcgccaataagcgcatcgaggtagcccggcaaaaacaggccgtaagcttacagaccttattggctctaggtagcgaccgtatggagcgtgacacacgttccatgcgtgcggcgctggaatcatccccctccggtattatctccgagttcaagcgtaaaagcccctccaagggctggctgcatccgggtgcgaatatcgccgacgtggtgcccgcttacgaggccggaggagcctccgcctgctcgatccttacggacggggatttcttcggaggttccttgggcgacttgcaaaaggcccgcaagctggtggatctcccgttacttcgcaaggacttcatcatcgatacctaccaactcttccaagcccgggtgatgggcgccgacgctgtcttgttgatcgccgccgcccttacggaagaagaatgccggatactcgccgagaccgcccatagcctgcaattggaagtcttgctggaagtccatagcgaggacgagctcaaatacctgaatgcggatatcgatatgctcggcgtgaacaaccgcaatctcggcaccttccatacggacgtaaacaactcattcaagttggtcgataagatgcgaggcttctcccctcttttagtgtccgagagcggaatctccgagaccgataccgtacgccgattgcgtgaggccggtttccgcggattcctgatcggagagaccttcatgaaaaccgagaggccgggcgataccctagccgattttataggaggactggcatgatcatcaaagtatgcggaatgcgggagcctcagaatatccgggaagtagccgccctagccatcaactggatcggctttatcttctacgaacgttccaagcgctttgtcgagcgatgcccaacggagcagcaggtaacggacagtgaacaattgtcccctaagaaagtgggcgttttcgtcaacgctaccatcgagtccatgatggagacagcctccgcctacaagctagactatctccaacttcacggtaacgaatcgccggaagattgccacaccctacagaaaagaggatactccttaatcaaagccttcccgatcgcctccaaagaggatttcaagaagaccaaggagtatgagggccgagtggattatttccttttcgatacgagatgcgagggctatggaggctcaggcaaacgtttcgattggtccatcctaaccgagtataaaggagagactcccttcttgctcagcggaggcatccgtccggaaaacgcagaggcgatccggaacttccggcatccccgtttcgcaggtatcgacctcaacagtggcttcgagattgagccgggattgaaagacatcgacaaactaaagaatttcatccaacaaattttacatctaacagtaatgaatcgcatcacaaacttattccagacccagaaagacggaatactctccgtctatttcaccgccggttatccgaacttaaacgatacggcaagcatcttaaaagccttacaggctaaaggtatccacatggtagaagtaggaatccccttctccgacccgatggcagacggccccgtcatccaagaggccgccacgcaagcgttgcgtaacgggatgtcactgcacctcctattcgagcaattgaaagagatccggagcgaagtacagatcccaatcatcctaatgggctacctgaatcccatcatgcaatacggtttcgagaaattctgcgccagttgcgtagaggccggcgtagacggaatgatcatccccgacctgccttacgccgattatatcgccgactacaaggagatcgccgatcgccatgacctgaaaatgatcatgctgatcaccccagagacctccgaggaacgaatccggctgatcgatgcccataccagcggatttatctatatggtatccagcgccgccacgaccggagcccaacaagatttcaacgaacagaaacaagcctatttccgtcgtatcaacgccatgaacctacagaatccccgcttggtaggtttcggtatcagcaataaagctactttcgaggcggcagcggcccactcttccggtgccatcatcggtagcaagttcgtccagttactaaagagcgaagctactcccgccgaggcggtcgataagttactggaagccctaaaacaataggaaccctattcatgtttacatataaaaacagtaaatagtcctatgaataacttcacttttcacaacccaacccgtttattattcggtaagggcatgattgagaaactgagtacggccatcccgatggtgcatcgcatcatgatcaccttcggaggaggtagcgtaaagcaaaacggtgtgtacgaccaagtgatcaaggcgctaaaggatcgtgactatatcgagttctggggcatcgagcctaatcccaccatcgagaccttgcgagaagctatccagatagcgaaaggcaagcaggtggatttcctattggcggtaggcggtggctccgtcatagacgggacgaagctaatctccgccggcatccagtacgacggtgatccttgggaattggtacagaaagggtattactatcataccgtgcccatgggtaccgtactgaccctgcccgccacaggttccgagatgaatagcggggccgtgatctcccggaaagagacgcaagagaaattcccgttctacagcaatttccccgtgttctcgatcttggacccggagacgaccttcagcctccccccgtatcaagtgtcttgcggtatcgccgataccttcgtccacgtgatggagcaatatatgactacgaccgaccaatcccgcttgatggatcattgggcggaaagtattttaagtaccttggttgagatcgccccgaagatcaaggaagatccgaggaattacgacctgatggcagatttcatgctatccgccacgatgggcttgaacggctttatcgctatgggcgtaacgcaggactgggctacccatatgatcggacacgagctaaccgcccttcacggattgacgcatggagcgactctagcgatcgtcttccccggaaccttacgcaccctacgcaagcagaaagagggcaagatactgcaatacggcgaacgggtatggggtatcaatagtggaacaacagaggaacgggtaagccaagccatcgagaagactgagcaatttttccaaagcctcggtttatctacccgcctcagccaagagaagatcggcgatacgacaatcaccgagatcgagaatcgcttcaatgaacgaaacgccgccttcggggaggcgaagaatgtaacgggtagcgtggcacgggaaatattggagagctgtaaataacgtacaacttgtagagacggggcgtgccccgtctctacaaataggtataggttttatcttaacaggactactacttggatcggaccatgcgccccgaataccaaggcttgttcaatatcagcagtctttgagggaccggacatgaagactccataatcataatccatagtggcagtacggcggtaagcctcattcatcgtatgaaccaattgagtcttgtccaacaagatcaccaaagcgttcgagataaagtacagacctttataacgtacctgacggggtaaccagacagcggcattctccgccacgccgaaactaccctccaccacagatacgtccgtcccgttcaactcccggggatcggtcagctcatccgggttaaaggtagcgcaagtaatctccttcaaattcgaggcgatacgtttcgcctccggaaactcacggcggatcacctcattcacatcctcgccgggctttaactcgatggccttgccacccgccccggctagcacttccgagaacgtagccaacttatccgcataggtaatcgcctccaacgtaagctcaggcatctcgtggcgtgtacccgtatgatgacggatactcgccaatatagaatctttactactcattatctcaccttattattcttccacatatcattaaacgactccttggcgaaagccggaagctcacgtcccttgccccaagcgttcaagccattgtagaccatgaaacgaggcaaatgattcactaccggagcaaacttcaacgccgtattgaacaatcccgaacgttccatcaggaacttcatgccgaaagacatcactttcttctccttgctcgccttaccgatcttatccaaatcttgccgccaacggtaaatctgctcgcccaagtcgatctttaccggacaaacgttcgagcaagaaagacataaggagcaagccgatacgttatccgaatattcctccggattcctcagcatacccaagttgatcccgatcggtcccggaatgaaatacgtatacgaatagccaccactcctgcgatataccggacaggtattcatgcactcgccacaacggatacaattcaacgtacggatatgatccggtttcgccaagatatcactgcgcccgttatccacgataatgatatggaactcttgtccctcgggcggacggcggtaatgagaagtataagacgtgatgggttgccccgtacccgaacgagccagcaaacgagtgaatacgcccaatgcctccagattcggtacgatcttctccatccccatcgtagcgatatgcaccttcgggaaggaggttcccatatcggcgtttccctcattggtacaaaccacgatctcgcccgtagaggcgacagcgaagttagcgcccgtcatcgccacgtcggcatgcaggaatttctcacgcagattcttacgggcggcatgcgtcaggtaggtagggtcgatattccctttctccgttcccatctcacgctccatcatctcgctgatctgctcccgtttgatatggatcgccggcatcacgatatggctcggggccaaatgcatcaattgcaagatacgctcacccaaatcgctctccaccacatcgattcctttcgacatcaagaactcgttcatatggcattcctccgtcagcatcgatttgctcttgatcaggttccgggcatcatgctggcgcaagatccgcaagacgatctcgttatgctcctcggcatctttcgcccaatgcacgatagccccgttggcgatcgcatttttctcgaactcctccagaagcgtgtccagatggctgttggagtaaagcttgatctccgaggccaactctctcaaccgctcccactcgggaagcgaatggctcatcttatcccgtttggtacgtaccatccaaagcgtatggtcgtgccaagcctcattctccttattctctaggaaacgggccgctgctatagcatgtttcgtactcataatccggacgctaatatttgaacgatgtgaatagtcttgatcggaagtttctcccgcttgataaccccttccatatgcatcaagcaagagctatccgcaccggtgatatactcggcgccggtactcatatgatcctttaccttgtcttgtcccatgcaagtagagacctcaggctcctcgatggcgaacataccgccgaaaccgcaacattcgtccacccgcttcggctcgaacacctcgatacctttcaccaaggaaaggagatcacgtaacttggaatagtacgggatattacgctcgctgggcgacgagagatgcaactcacgcaccccgtggcaactattatggatactcaccttatgcgggaaaacggccggcagggatcccggtctcaccacgtcgtgcaagaactcgcagatatcataaatcttcttactgttcatacaaacgtgatcccgcttctccaagatatggggatggttctcttttacgaaggctacgcaactggccgaggggcctaccacgtagtcatagttcttaaactgttcctccatccggagggccaagcgagccgcctcatcctcgaagccggcgttcgccatgggttgtccgcaacaggtctggtccatcggataatcgacatccacacccacatgcctcaacaatttatacgaggcgatacccacttcggggtacaccgcgttaatgtaacatgggataaataatcctaccttcatactaattttatcttatatatcatatacgacaccgtatataattaacacctacaagcccctcatagctgcatattggcccttaccctgcttaatgtctcgggagtcatcagcaaataagaggcgatatgggacaagggggcacgctgcacgatctcagggtgttctttcaataagcgggcataacgttcattagcggtctcgaaacgaaggaaatccgccttccgttgagacaggatcagcgaattctccaacaggcggcgatacatgacctcgatctcgtaatcctcggcgcacaatgccaataaaggatcatgaggaatgccatacagcaccgtattctccaaggcctccaccaacagattagcgggacgctggcgcaagaagctctcgatgcaaatgaagatgttgtcctcgctggcgaaatgctcggtcagctctttcttattcttgaagtaaaactggcgaaccattcccttatagacataaccgagttgcgtacaaacctctccttcgctcaaaaacagggcgccttttttcaattctgtccggattaagatagaggccagtttctgggcggcttcctcactgagtagaatcgattgcgccgcgatcctgcgagctataaatatcgctgtatccatattcatggttgtttttgtttgtttccgcaaacttacgaaataaataccacttgatttacatcaagcccccatttatttatattcctgccaactcttgatgcagatatcatctacgctcaaggtacagaaggcttgaatgaaagcgctcgccagacgggcattcgtaatcaacgggatattcaggtcgatggcggcacggcggatcttatagccgttgtcaagctcgccggcggaaaggtcacgagggatattcacgaccatatcgatctgcttctcatgaagcatcttaagcgcctgcggttctcccttctcgctcggccagtacaccttcgtactcggaatgccattctccgccaagaaacggtgcgtacctcccgtagcgaataggttgtagcctttcgtcgccaacatcttagcggcatccagcatggctaccttctgcttcggcgtaccggtggacaggaggatattcttctccggaacccgttgcccgacagcgagcatactcgtcaacaccgcctcggatacatcgtcgcccagacaacccacctcgcccgtggaagccatatcgacccctaataccggatcggctttctgcaagcgattgaacgagaattgagaggccttgatacccacataatccaaatcgaactcattcttattcggtttctctaccggcaagcccagcatgacacgggtagccaactcgatgaagtttatcttcagcaccttgctcacgaacgggaaagaacggctggcacgaaggttacactcgatcaccttgatctcattgcccttcgccagatattggatattgaacgggccggagatattcagctccttagcgatctgcttactgatacgcttgatacgacgaaccgtctctacatataatttctgggccgggaactgaatcgtagcgtcgccggaatgaaccccggcaaactcgatatgctcgctaatggcatacatcacgatctcaccatgatcggccacggcatccatctccacctctttcgcatgctcgatgaactgacttaccaccaccggatgcttttggctgacgttggcggccaatttcaagaaacgctccaactcctcttgattcgagcagacattcatggcggcgccactcagcacgtaactcgggcgaaccaatacggggaagcctacctccgccacgaagccattgatatcctccatggaagaaagctctttccagcggggttgatccacgccaatacgatccaacatggcggagaacttctcacggtcctcggcattatcgatgctcttggcggaagtccccaagatattcacatgctgctcgtccagacgcatcgccaagttattcgggatctggccgccggtggagacgatcacgccgtgcgggttctccagctcgaggatatccatcacacgctcgaaggtaagctcatcgaaataaagacgatcgcacatatcatagtcggtagacaccgtctcgggattgtagttgatcatcacggaacgatagccctccttacggatcgtattcaaggcctgcacgccacaccagtcgaactccaccgagctaccgatgcggtaagcgccggaacccagcacgacaatcgagcgatgatcgcccaagtacgtcacgtcgttttccgtaccgctatacgtcaggtacaagtaattcgtctgcgccggatactcggcggccaaggtatcgatctgtttcaccaccggaagaatgccatgctccttacggaactggcgaaccaacatcatacccttctccacatccccgtcgagaccgatcgcccgtgcgatctggaaatcagagaacccttgtatcttcgcccggcggatcaactccggattgatgcgccaacgttggatccccttcatatcgaaagcgtgaagctccttggaggtctgcatgattccatatagtttctgtaggaaccatcggtctatcttggtaagctcatgaatctggtctaccgtataaccggcccggaatgccttcgagataacgaagatacggcgatcggtaggctcatgcaaagccttatcgatatcctcgatcaccaactccttattctccacgaaaccgtgcataccctgcccgatcatacgcaagcccttctggatagcctcctcgaaagtacgtccgatcgccatcacctcgccaaccgacttcatgctggaacccaactcacgagccacgccatggaacttacccaagtcccagcgagggatcttacataccacgtaatcgagagccggctcaaagaaagcgctagtcgttttcgtcacggagtttttcaagtcgaacaaaccgtagcccaagcctaatttagcggccacgaaagccaacggataaccggtcgccttagaagccaaggccgaagaacggctcaagcgggcgttcacctcgatcacccggtaatcctcactctccggatcgtaagcgtattgcacgttacactcgcccacgataccgatatggcggatgatacggatcgccaactcacgtaatttatgataatccgtattactcaaggtctgcgagggggcaatcacgatagactctcccgtatggattcccagcgggtcgaaattctccatgttacataccgtgatgcagttatcgaagcggtcgcgcaccacctcgtactctacctctttccagcccttcaagcttttctccaccaatacttgcggagagaaagagaaagccttctctaccaacacgtccaattcttcctcattgtcgcagaaaccggaacccaagccccccagcgcataagcggcacggacgatgaccggataccccagctcagcggccgcacgacgagcgtcagcggcgttctccacggcctcgctcttgatcgtcttcacgtcgatctcatccaacttgcgtacgaacaactcccgatcctcggtatccatgatagcctgcaccggggtacccaataccttcacgccatacttctccagcacgccgctttggtaaagagccacgccacaattcaacgccgtctgcccgccgaaagcgagcaagataccttccggacgttccttctcgatcaccttttccacaaaaaaaggagtaacgggcaggaaataaaccgtgtccgcgactccttccgaggtctgtaccgtagcgatattcggattgatcaataccgtttgaatcccctcttccttaatcgccttcagggcttggctgcctgaataatcgaactcgcccgcctcaccaatcttcaaggctccggaaccgagtatcaggactttctttatatcttctttcattgctttactttttttaatgttctcttttagggtagacctaaacactcatttagggttgccctaatccctcgtttagggtgggcgtaaatccccggctacaacaattccgtgaatttatcaaacatgaactccgtatccagcggcccgctgcaagcctcgggatggaactgagaggagaagaaaggcttcgtcttatgcttgataccctcgttcgtcccgtcattcatattgacgaacagcggttcccactcctcacccagcgtatcgttatccacggcgtaaccatggttctgcgaggtgatgaagcatttctccgtgcctaccatacgtaccggctggttatggctacgatgaccgtacttcaatttatagatagaagcaccgccggctttcgccaacaactggttacccatgcaaataccgcaaatcggcttatccccggaaagcgccttacggatattccgcacggcggcatcgcaagtatccggatcgcccggaccgttgctgataaacaagccatcgtattccagctgattgaagtcgtagtcccaaggcacacggatcaccgccacgttacgcctcaacaggcaacggatgatgttatgtttcacgccgcagtccaaaagcacgacgcgctttaggaattgagaattgagaatcgagaatcgggaatcggaggcttccaataaagaacaggtctggctcgtaccatcgggcaggtaacaaataatctccttgcacgatacccgatccacatagttcacatgctcataatcctcgatcttcaattctccatttccaatttcgttatcggcatcgccgataacgatacgtcccatcatcacgccatgctcacgcaatttcttagtcaacgcacgcgtatcgataccgtatatgcccgggatcttctcctccttcaaccactcgcccaagctgcactcggcgttccagtggctatactcatggctgtaatcgctaacgataatcgcctcggcatggatcttctcgctctccataaacgtagcgatcccgttcggctcgaacgtacgaggtgggacaccgtagttaccaacgagcggataagtcaacaccatcaactggcctgcgtacgaagggtccgtcaagctctccggatatccggtcatagcggtattgaacacgacctcgccggccaccggtctctcatagccgaaagagtagccacggaagacggtaccgtcgtctaacatcaaagttgctgttctgtttgtctgcatagaatctgtatgttgtgtcatttcactaaatattcttcttccatatagtgaataaaagcctcgttcactaaccgagtcccgcccggtgtcgggtaatcgccggagaaataccagtcacccggatgctccggacaagaggcatgcaagccctccaaagtctggtagacgatctctactttcgcctgtgtcccggccggtgtaagcaactccaccatcttaacggatatctcctcgtccgtaaacggggcgtatatctcctttacgtaattcaccaacggaccatccgccgctgtttgttgtcgcttcgccttctgataagcgtccaagatcacgtattccatcccccggtcacgtaacagggccaccgcagccttaaaagcgataaactcgttcatccgggacatatcgataccgtaataatccgggtaacgtacctgcggagaagaacttacgatcacgattttcttcggatgcaggcgatccaagataccgataatactctggcgtaaggtagtaccccgcacgatgctatcatctatcacaaccagattatcgataaaaggttcaatacttccgtaagtaatatcatatacgtgcgccgccagatcattgcggctattgccctcagcgataaatgtacgtaattttatatcttttatagctactttctccgagcggactcgcatggaaaggatttgctccagttcctcttccctgagcaggtgactacggtcggcgatccattcttttttcagcttattcaaatagttgttcaacccctcctgcatcccgaaataagcgacctcggccgtattcgggataaaagagaagacggtatgattcaaatcataatccaccgctttcaagatcggatgcacgagattatctcccaaacgtttcctttccctgtagatatccacgtcgctaccccgtgagaagtagatacgctcgaaggaacaagccttattttccttcggctccacgatctgggagatatgccactcgcctttcttgttgacgagtatcgcctctccccgattcaactcccggatatcctctacctgcacgttcatcacggtttgtataaccggacgctcggacgccaacacgataatctcatcatccgcataatagaaggccggacggattccccacgggtcccgcacgctgaacgactcgccactaccggtgataccgcaaatcacgaaaccaccatcccagcccggggtacagcgtttcagcacgttcgacaaatcaatttgatcctcgatggcatgcgtgatatccatccctctcaatccttccgcctcacacttttggtacaggcgctccacttcccggtccagccggtgtcccagctgctccagcatgatatacgtatcggaatatttccggggatgctggccgatcgccgtgatctcctcgaatacttcatgaacatttgtcaggttgaaatttccgcaaacggcaaggttctttgcacgccagttattgcgtcgtaaaaaaggatggatataagagattccggattttccggtggtactgtaacggaggtggcccatataaagctctccggcgaaaggtaggttggctttggcgaatagcggatcgttgagttgctcgggggttaaatccttgtagtgttcgtgaactgcggcaaatatctcggtaatagctccggtcccgacggcccgttcacggaacatatattcctctccggcatttgcctctaacttcacgcaggctaagcccgctccttcctgccccctgttatgctgcttttccatcagcaaatagagcttgttcagtccatacatccaactaccgtacttctcgtgataatactccaagggtttcagtaaccggaccatggcaacaccacactcgtgcttcaatacttccattgtcgaatcaactttttgattttgccgcaaagatacagacaatacctaacatattgtttaaacaaacataaaataattgacactttcacggaaaaaatgtttttatcggacgtttggttaacaaagcttacattttataagcaaaagggagcgttttattttcaatccataagccactcatttccctcttgaaagaggcctttcaaagatatccatccgagaaccgtaatatttccgtaacagaaagaaaaacaccaatattctttctggcacagaaatattcttgcataaattctttctatcatagaaataattcggtaattttgtgcgtaaatataaattccatagaatgaatacaaatatactccaaacactgataacggccatgcaacgccgattagcggctcttccgcagagattgcggccatttaccacggagtttgatgagctccctaaaaacctgatgctaaccggtgccagaggatgtggcaaatctacatttctactccatcattcacaaggcaggcgcttattatacttttctgctgataatccgaagattattggcgaaccgctctatgacttagttagtagcgtattcatgcttggttatgaaggtgttattatcgacgagattcactacgcatcaaactggagcatacatctgaaggccttgtatgatgactatccaggaaaaatcatctggatttcagattcctcatcgttagtacttcgtgatggcaaagccgacttgtccagacgttatgtagcgatacagatgcctttaatgtcgttcagagaatttctatatcttgaaactggccaaatataccccaagtataaactgggagacacaatactacctacacaaccagatgcggagctgttgaaccatttcctcaattatcgtagttacggtacacgtcctttctaccaagagaaagatttcgaagcacgttacatggctatcatcgacaaaattctcaataacgatataccgttcttcctgcctagcatttccgaaaacaacctacgtgtgatgcgagccattatcggcacactggcaaactcctcaatacctcgtgtacaagtcacctccttatgctccgactggggaataggagcggaaaaactctatcaactactctttgtgatggaaagtgtagatctattgaaaatagtaaagtaccccaatgacacgaaagcccgtagcactggcgcaaaaatgttgttcgcagacccatgtgcttataaggttttgaatgcagaccaaggaacggaacgtgaagcctacactgtccactgcttttctagggcaggttacgagataaacgccatgaaagacgagaagaaaggtgattatgtgattacaaaagaccatgtatcacaaaccctagaagttggaggaaaaaacaaaaatcctaaagaagcggactacatcttgagagacaacaccgactaccctgtaggcaacgccattccattctggctcatgggcatgatgtggtagtattttgtaatacaaaggtggtgagaagcataatgtcatgtttccggaaacaaaaaaggcctccttttaggggaggcctttatgttaaaaaacaacggattatctatttaccaatctcaagggtagcctatctgccatatcctcatttcctctgattcaaaaattctacgatccttccacaagccaatccatccccatagggattaaccgccttgctcatcgtatcgtaataaaccgtatcatcaagcaacgccgagacctcgctcacgatcttatcataatccgttccgaccagtctcaccgtacctgccgcgagagcctccggacgctcggtcgtatcacgcatcaccaacacgggcttgcccaagccgggggcctcctcttggataccgccgctatcggtcagcactatcgttgatttctccatcagatagacaaacgacagatattccaatggctcaatgaagaacatattctccaaatgagaaagatcctcaccgaatacctcatgaatcggcttgcgcacattgggattcaagtgcataggatagacaaagtccacctccggatatttccgggtcaagtccttgatagcggtacacatatggatgaatccatcaccgaagttctcccggcgatgacccgtgatcaacaccagtctcttaccctcaaccagacggttcacgtcatacccagaacgtaaaagcacgccttccagctccttgtccagctcagcgtccgtctttatcttagtcaccacttgccgtaaggcgtctatcaccgtattgccggtaaccaagattgagtccggactcacgtcctctcgcatcaagttttgcttgctcaaccgcgtgggtgcgaaattatacgtggcgatacgccccgtaatctgccggttcatctcctccggccacgggctatagatattgtgggtacgaagaccggcctctatatgaccgacaggtatctgttggtagaaagcggccaaggcggccgccgtgctcgtggtggtatccccatgcaccagcacgacatcgggtgtcgcctcacgcaacacgtcacgcatacccacaaggacacgggcggtcacgtcatataagtcctgaccctgcctcatgatattcaaatcataatccggcgtgatctcgaacaattttaacacttgatccagcatttcccgatgctgtccggtaacgcacacgatggtctcgaacgactccggatgtttttggaactccttcaccagcggagccatcttgatcgcctcgggacgggtcccgaagactaacattattttcctcattacaacgtattcttctatttaacgaacgattatttcttgaatgtcccgcaaaagtccagcacctccacgtcatcccgataattcaaccccgaaaactccctatgattcaccaagaaaaccactatatccgccttctcgtatgcctccttataaggggtcagcttaaacagcttatgctccgacacgttcggctccaccaccatgatgtcagcgttgttacacgattgcagcaccttcgtcgttattcccttggccggcgattcacgtaagtcatcgatatcaggcttgaaagccaagcccatcattgccaccgccggcttgcgcccatgcttcaactcaaaccgtagcatggcgttcctcactttctccgcgcaccagaaagccttgtaattattcgtctcacgggccgtcgagatcatgcggctctccatcggaaactccgccgtgatgaagtaaggatccaccgctatgcaatgaccgccaacaccacaacccggccgtaagatattcacacggggatgcttgttcgccaaatcgatcagctcccacacattgatcccggccttatcacaaataaacgacagctcattggcgaaagcgatctgtacgtcccggcttgagttctcggtcaatttacacatctcggccgtcttgctattcgttgggtgaagcgtacccttcacgaactggccgtagaactccatcgccttacgggtagaggcctcgtccatgccgccgatgacccggtcattatgcaccaactcatagatcacgttacccggaagcacccgctccgggcaataagcgatatagatcttgccctccagttccggccgctccgagaaaatcaacctagccatccgttcggtcgttcccactggcgaggtagactcgatcacgtacaaatccccctccttcaacaaaggaagcaccatacgggtagccgactcaacgaacgatacgtccggctcatgatcccccttgaaaggagtgggtaccaccatgaaataagcgtcgctcacctgaggctcggtgtaagccttgaaatgtccggaggccagtacctcccgcaacatatcctccatacccggctcgatgatatgcaatttcccttggttggtaacctccaccacctgggcgttgatatccacgccggcgatctccaccccgtgctttgcggcaataatagccgtgggcaggccaatatagcccaaacccatgaaacatgctttcataagaattatgttattatgttatattgatttagaataagaaaacggagatataaattaaatcagtcctaatttcacccgaagcaagaacctcactaaatgtatttgtcttttaattcgaaccggttccttcaccaaacgataggcccattccaaattatgtcgtacccaccattgcggggcacgtttcacgttaccggtatatacatcaaagctaccacctagaccttgatagacagctttatgtcgttcggccatctcttccattagcaattcctgttttggggagcccatcgccacaaaaaccacatcaggtcgttttgtcacaatatcttccaataaagcttttcgctcctcctctgttttaatatagccattccggaaattggcgatccgtataccgggataatcctcttttagcttttttacggtctgttcgattacttcttgttttccaccaaccaagtaataactctttccttgttgataggtcatattgatgatacgcaaccacaactcgcaccccggaatcttgatcacttccttatgccctttctttttcaacgccatgaccgctccgaaaccatcacaatagcctatatttcggttgatgatagaacgggtctgatccgtagcatgcaaaatcttttccgcattgatagccaccaatatccccttgtgccgactcacaaaagccaacaattcctcatgcgaagtaaaaggatataccttcaccccgttcaaagagactctttccatatatgtttttgattgtaaaaattcgattggtaaggtttcagtttaggctactacaccaaatatcatttactcttactttgtagaaaagaatttatagctgctttattttccctttgtatcaagtggatatatggagaaaataagcccccttttcgaaatcatttacacaaagcacataatactcaagaaacatacaactcatttagcatttgttttagaaaatcatctgataaataatccattccggggctgaatgtaaattcaccaaatacaggatgaccatttatttgataaaaatcaatacggacaaaacgaaaaggacgagccagaattgaagcaagctgtttcatttcttcaaaactggatggacatgccgtaggtgtttttggtattttcgcatcttcagtataacaatttaccaaacgctgccaattcatatcaaaaatctctatatatgtattatgcatattcaagattctattggaacacaataaacagtatagtggcctaccattcagacaatagaacttataatcgataagcatcttaccatcttcctgaccatcagaaagaaattcctctgctataataagcggcttaatatgagaataatgtaactgtcctgttaaagctccataaggatatgcaagccaacgatttaaattttgacgtatatcatttatgttaatcgcacttttatcttttacaatcaaattggtagcacaaccattattagttttcagaacaaacttctctggtaacgaagcaaagtcgatttcagcggcattagaccaataaccataaagtttattcacatactgggagcctatttcctttattacataatcacgcacagcatatttatccgctaaacgaatccaaagtgggttgtttgcattttcaatagtaaacctcaccatttgttcaaacatatcacgaggatgattaagatgtagcaaacggtgaaaacgtttaaagtacctcaagtgccatacaaatttaggcatacgacttaagaaacaagcaaaaaaaatttccataaaatagtctaaataaacaacatatagtttcacaaaataaacttataatctcttccatattactaaaacattgaaagatattttttgtaattatcaatcattgcataaaataaaaatttattttcatacacttttctagaattaaaagaaagtctatgatattcacctgtaccaggtaaaggaagattattaatacactctatcaatccttcccaatcagaaactacaaaaccattatatccattcatattaatatcaagaacagattttatatcatttgtaataagcggcttagcaaacatacatccatctatcaaagataacggaagtccctcttttttagaaaacaaacatacataatcgtaattatacaattctttatagacatctataaaaccaagaacaatatactgattagaattttctatttcatctatcaaggctttttcatctggaccttttcctgcaaagtatatctttatattagatgatattttaccttttgtacgtttaacaaattctatttgttgtttaacaggaaaaagagcagcaagcaacacgatttttatttcatcatcaaattttctattatcaagatattttaaataatgatctttcattccattaaaaataaccattattgacttttcttttactccaaaatatcgaacaagattatcttttacagaattagatacagctataacttttttcgggaaaaagcaagcccattttaaattatcaaaactattatgagcgacatgtactatttttaatttattaaaaaacaaaaacagattcaatagaactagaatagaggtttgctttctatgatgtgagagtactactatttcatcaccaaaacagtatcgccaaatattttttaaactaaaacgtttatactcaacattcaaattcatataacactcatgaattgaaggactattagtaaggactataggctttccctccgtattaagttctctagctaactccaatgctaaatcaggagcacctcctctatcccataaataaggatatacagttactattttcatatactttatttattaattacatctataaatattaagacactccgcacttatatcttgttttagatatctatatgatccagcgataattaacataggtaataagtaattaagttgaacacaaaaagcccaagaaggttcaaaaaagaaatacacatggaaacaaagtagaaacacttgcgactcataaactttaagcataaaatatatcttgtatacaaaatacatataaaataaaaacattgacaatccaaacgcatataacgtagttacataaaaattatgaacaggataatttaagacatccatagatgcttcatttatcaatttatcatatccccataaattaatatcaaaattctctactatatacaaaacctgcatagatctacctgttgtaccctcggattttccaaacataataaaatgcgaaatattcatcaaataaggttctataactatcatataatatacaaccacaacaaaaaaaagtaatataaaaacaggaaaatataccctatacttcaacagatatttcttaaaatataaaaagaagaccgatagaacaaaaaacaaaacagcattcctcgattgacaagctataagacctataataacaaacaaaaatgatagttttttaattttctgtttctttataaataaataaacagaagcaaacacacaacaaataaacaaagaggccatattcgaattctgaaatatcaaattccaacctgttccagagctatccgacaacaatcccattattagttcttttggataagcgacaaatgaaaatagatatattcccaacaataagaatgcaaacaaatccatcttaaaaacattcacccataccgttgtacataatagataaacaagtacagacacagtaaaaccttcaaaatttccacctccataaacaaaatgaaaaactatcagaataacgaacattaatgtcataattccaaatttttcaaaaaaacgcctcattgatgttttaagatttgcaaataccaatataagaaacaacggatatacaaaatcttttaggccagaaaaagcattagtaatatcccctaatgacgttacatataaaacaaacagaaaaacagaaataaggagtaaaaatgtatgcatcatattacctgtttatcaaatgaagaaaaacgaaactccttcttaactttgatgaaaaagaataacctagaaatctttttattttctttataattctcttttgaggagataaccaactactatcataatgatgtatcgaccttgtgttacttgtaatatgtaaagtcagcgtttgatccaaaggacaaaaatattctttaggataaatccatacacctgcacactcttgtatttcattgccctccttcaaaccatattcacaaagaatttctgtcgtatattgtacaattgtcttttggttgtaagttccatccttatttacaaaggataattttgaatacatctccaaaatttccttatataggccgaggccggggttcaccccaaggccgaggccgggggctacactcgctacgctcgtgtcgctcacatctttctcacatcccatgaacggaccacgagcaataatatcatccatcggttttataacctctacgtccgtatcaaaataaagacctccatatttgtacagaatccaaaaacgtgcataatcacttacaaacgcatatttccctacttgataagcttcttgcgtataagggataatgttcacgtcaaaattatcctcattccattcttttatctcatagtcaggaagatatttcctccacgactcgatacactttatagccaatgaaggcaaaggatttcttccaaaccaacaataatgaataactttagggatcatagcatttatttaattatttaaacttattcacaaaagaacaattatccatcgtttcattttcagacatatgatacaatccatcaggattttctctataataagaggttacttgacattctattttagaattttcaactttcctaaaacctgtagcaattaatttagcgggaattcctcctatcatcgaactctctggaatatccgaatagtcctttcccaccaaactattactagcgactatcgtaaaatcaggcaaaacagtaccacctgtaatagtcgtggtattacaaatccaacaacctcgaccaatctctatgggatgtgtccaacgaggaattatgccttttttaaaattagctacataatggtaattagcatccaatatctgacacctatgtgtaatcctagattgtgtaccaatcaatatccgtgaaaaacaccccacgttacacatatctgtaatcttgaaattctcacccaaatccaacgtagcattcaacatgacattaattttagttccagtaccaataaaacctttacctctaaaaaagatctttcccctgttctggatttctgactgaacatccatatttgaaggggctccaggtttcgtctgattaaactttatcatacccgtagaaaccctacctataatttccatacatcctgacagaccataaatacgaggtcgaccataaacaaatattggaaaacgataagcttggtacaaagggaagctacgcaagtttaaccataatgttaaaaaaggattgaaccagttagaatagaaagatcgttctagaaatccaaaaccgaataaataatctattcgctctctaatctctttaaatgatttatttctaattttccttatcattataaaaatattgtataaatttcatttttatctcacacttttccttcgaggttattcctacaatataaatagtcaataatacgactataaaacaaactagtgaaacaagaaataatgatgcaaaactttcgctagaataataactaaaagccaacataataatagaagataaaagaacaaccaatgaaatcggaactataactttacctatatactgaaatattgaaatacttacataattacccacaatttttactataacaaaaagatacacaaatcggattcctgacagaacttgaaatacaacgatcggattatatccacatttcaagaacaaataactaacaggaaaagccatcaaataaaccgtacttcctacaaggatatatcgccgtaaaacacctatggcttgaatagcggaccaaaaaggattagttaggatatttatcagactatatatcaatatccaacgagcaaaatccggagcatactgaggaacaatccccaaccataaagttaaaatgcaatctatcttcaacaaaaacggaaggcaaagtaaccacatcagaaaaaaagaatatcgagaactattataaatcaactcaacaaaataagaataatcccgatgagcataagacttcacgatctgcggacgaaccgccacaaaaaaattagaaccaaaattattaatcgcagcattcatttgtgtagccactgcttttgccgcattcactgccgggccaaagaatatatttaacaatatactcatcccttgctcattcaccgcccatacggctgtacctaaaccattccatcctacaaatcgaaatagtttagtaaataaggaaaaattccaatagaaccttattctacattctgggtatttacatacacaaaatatagcaggaataaattttacacacacagttatacagagtaataaccccgaataaagtttcaacttatcaaaatccacatgatccaatatataaactatcagtagttttcccacagcttcccaaacaccaatataagcatacaacctcatattttctcttgcaattaaaactgagtcaaagacagttcctaataacgttaccaccaatgaagccatcatcgcatgaaaaacccataaggcagaatcaaatctattcgctggtatcacaagtttattatttatcaaccatataccaataaactcagaagccaccaatacaactaatgctattacagcataaactaacaaactgatattaaatatatttttaacgctatttatgtttccaagtcctaattcaaaatttaaaaaacgctgtgttgcattagataaggatgaagaaaaaaaaacaaaagaagatgcaactccccccaccacgttataaatcccgaaatcctctacccccaacacatgtagcactacccggctggtatacagcgtcacccccataataaggagcatacgcacgtaaaggaacaacgtattcttcgctatccgtttattattctctgatgtaacagacataagaataagcaccctcaagtcttcctgttctgccaataaatcagcagaacaggaagttgaatgtattgattttaaatgagtttaaactatgtttatcatgatattgatataagctaaaggaatcagcttttcatatcttttgttcccttgcgaatattctagtgtaataattcaagtttggctataaactcacgtacgtaaataacttttctatctataactttatccgtacatatcagcccttgagagttacccttaaatacccctcattaagcacctcaacctcattttccccgaaaatgataacatctaagtcttgcttgtatttcagtttcttgtcttggtctaggacgaaagcgtcaaaaggggctttactgctatggtctgggatagaaataatccagtaaacacgatgacactggcgatttatgatttttttctcgtctctcaagaacaagaatgttttttccaattgcctcaaagcattaccggcattcgaggctatatttttatctaagcaatattttagttcgagtaagaataaccatcccttgtttttggctcctgaagacgcacacatacattcacattgctttaccaccttgccctgctcgtctttcagcacagattggttctcttcaaaattgacagcatcaatagaaataccctttttatttttcaaatgaaatacttccagttcccccggtttatttgccaatattttcacaccagaaacagaagtatcgtgtgtcttagaatactccgtatagtcagctatataaatatccgaattatgattctctatatgtgggaatacgtctctcatccctcctcataataattaagcatattattaaaatccttcatgattccttgcatgatacgattgaaataattagcccggatcaatccggaggcatcctgaatggttccgttaggattattcccatccgaacgcatcttgccatcctctatttcccaaaccgctacatctatcggattcaacgccgcatttctacaatccaattcctcatactcttcttctggcatctcgcttttcaccctataagccatcaagcagttattcaaggcatagaggatatacgggctgtgggtcgtaagcaccaaacggtggttccttccatgattgatagcggttaacagatagaaaagaaggtctctctgggcctcggggaaaagattttgctcgggttcttctatcacaaactgcgtatgcgtatatacttttccctgtataaagcccgctaaacgtcttttcagttcctctacttcctttgatgtccgattatccccgtccagcttttccaacagttttacgatcttttctccctccgcataggaataaggtttctcttcctcatatatgcccttggaaagccaatcgatcaacaggatcaatggcacgatagactgcaatccgctggatgcagtacgcaacatcaattttttaccgttccgcatctgcaacacgtccgtatctccatcccctaaatagtattctattcccatattcaagatgtccatcttatggtcaataggatattttcgtttggcatcgtaccaattctttataaaatccagaagattatcattatcttccgcatagtcacgaagattggggacggcagagacaaaatttcgttccgccgggatataaatcaccttcggattgattttcttttctatcgggaaaaagaaaaactctttctcattataatgtgccgattcatattcaacacgatatgggatcggtatcgcttcggcttcattccaattataagcatatgtcaagttatcgccggcataatagatcatggaatcctcattaaaataagaaccggataatttatgataagattgtaagcgtttataggcatccttccatgccatcttctcttcaaacgcatttgttttctccatccaagtacaaaaactgataattttagccaatgtacttttgccacaactctgtggacccatgaatatattcaccttcttcagttctatatccacggactttatgggtcctacattttttacaatcaaacgggacatatttttcactttttgttcttattcatgcaaatatagctctttttttcaattatcctccttcccccagcacatacttcctgatcccataccgaatgctcggtacattcgccccgttcacgaacgtgaggtgaggcaagagggcgctgatgaaggcacggctcttgaccagcttgaggggagacgagtagtcggctaggatctcgttgtaaaggtccgtcaataccgtttggcaaagggtgaccgtgtccgggcaggcgtgtaggcgggcctcgtagacaagacgggtcgcctcgtccgggatgaacaaggccaacgaggagggttcagccgtcaccggaggggcaggagagtttatcggaggagacggagactcatgaagtcccgattccgcgggcgtaatccagcgttccgtccgtgtcaccgtcccgtcaccccaatggatgttctggatagcgatggtggcattgggcaggatctgcacgttacctccattgaccgtaaaggcagaacgtgcctgttccgcccgctcttgattttctgtcatatccgtttttaatttaagtgttaacaataatcacccctttcacgggggtatattttatttctatcctcatttcatccaccgtacgtccgtttccgtacccgtcccgtccatcgctattccgggaacgggcaggaacgcgttcctttaccggcagtaaccgaataatcaatttattttatccgatcatgaaagagtctatcttttcctttttcaacgcccccatcaccaatcaagtaccgaacggggtcgtctgtgtcagtcaattgtacgcctatatcaccaccagcgagtggctgcgtgagcgtaccgatcaggtacgtgccgcatcgagcgacgagaaacggttcaggcggctgaaacagagtttgctaccctatgtcacgcccgccggtatcttctcctaccgcaaggaagatcacttgctcgtgccctcgggcgagttcgtcatcgacatcgatcacctctcctcacccgaagaggcgatctgttggagggacacgctgttcgccgatgagcggctacgccccgatctctccttcgtgagtcccagtaccacgggaatcaagctcctcgtaccctatcgcctgtcgatcaagaaaaccgtagaggagtctttcgatgaggcggtacgattcgcttgggaatatcttgagtggaaatacgggctgaaagctgatgccacgaacgcagacctctcacgggcttgcttcctttgccacgatccctcagcgaggctaggagaccggaatcgttgacagaggacaagtgacagttggcagttataaatcgttattcattattcaccattcattattcattcatcatgaacccattatctgatctggagcggctcgttgccgccatcgagaaacagggggcgaacatcgctcccacctatcaagagtatatgccgatcaccttcgccatcgccaacgattgcggagaggccggccggacattctttcatcgtatctgccggatgtcggagaaatatgtctccaccgaggcggataaactatacgaccatgccctcaaaggaggcaacggacggaatggcttgggatccgtattccacttggcggacctagccggcgtgaaactggacaaatccatggctgaggccgggaaactttcaaactttcaaacattcacgcctccttcacacacgcacacgtgtacgcacgaggaacagtccgtgaaaaatgtcccgcccgcctttccggagtatccttggcccgctttcctcaagcggatgatcggccggggcgatacccccgcccaacgggatatcctcctgctgggcgctatcaccgtgttgggagcgacactcaacaaatcgctccgaatatcgtacgggcgaaaattctactacccttgcctgcaaacgttcatcgtcgcccctcccgcctcgggaaagggagccctcgcttggacacgccggcttgccgagccgatacatgaggcgatgatggcgaactaccggcagaggcataaagcttaccgggaggagaagagccgttgggactcgctgggcaagaaaaaatccgatacgccggagcccgagatgcctcccctcaagatgttccttatcgccggtaacaattccggcaccggcgtgctggagaacctcatcgaggccgacggcatagggctgatctgcgagaccgaggccgataccgtgagcacggccatcggcaccgagcacgggcactggagcgataccttgcgtaaatgccacgaccacgagcgactggctttcaaccgacgcacgaaccgggaataccgggagtgccccgcctcttacctcagtgtcttgttaagcgggaccccggcgcaggtacggccactcattccctcggccgagaacgggttgttctcacgccaattgttctaccggatgccacccatcgacgagtgggcggatcagttcgagcagggcgacgaggacatggatagcctcttctccgattgggggaagcagtggaaaatgctcgtggactacctgcgtgagagggtcaatatcatacaattccatctctccgacacgcaaaaggagcaattcaacagctgcttcgcacgcatattcgggcacgccggcctttcctacggatatccgatgcgaagctccgtggcccgtatcgctatcaatatctgccggatcgcttccgtggtggccttcctacgatcggtggagagtctcctcatcccacaagccattctcgattctcagttttcaatcctcaattgtcccggtctctcgcctgccctcgagatcccggaggagaacgtacgggacggtatcgttccttccctagagttacgcatcgacgataacgattttcaagctgtcctctcgctcgtggagccgctctaccgtcattcggcgggcatactctccctgcttccgtctgacgaggtgccacgctctcgcacgcccacgccccaagaggctctctttgcggcccttccactctctttcaaccgacaacaggccttggaggaagcagagaggaacaacatccccaccgccaccctagatacctgtctcaagcgaatgcaggaacgaggcacgctggagaagaacggccggggcgagtacagcttcggcggccgtgtcacccataagtaatcccgacctccctcacacccctatataacgtaccccacgggcgtgtgtgtgtgagggggggacgaatgtttgaaagtttgaaagtttcattctcccaaatctataaatcataaatcaaatgtccttaccattaagaaagtctgcactggcggcatcctatttccctgagctggcctcccatcaagcttgtaaccgtctacgccgttggatcatccgatgcacggagttgtacgataagctgcgggagacgggctaccgccccgagcaacgtatatttacgccccgacagatcagattaatcatccactacctaggagaaccgtaaattagttgacagttgcgcacagaggtaaataaaaacagcctactgtcactagtcaactgtcaacttggatgggtattctaagatctttacaatgcccatccaaggcttcttataatgcctattcaaaggggcttacgataggcagcgtaagaaaccggcggttatcactgcgtcccatgttaattaatcgttattccctaccccgggcatcaatcggcatcaccgccccttacggcggaacctatctttgtaacattgatcagcaagcaattaattttctattattaatctttaattatcaaactatgccacaagcatttcaagcacgaaagttttttatccccaagacggatcctaagcaggaggtgtacaagccggttccctattatttcggtaccctgtccacacaagatgcggccgaccagatcgccgaggagtcttcgctcacgaagggtgacgtattgaacgtattggatcgttatcagcggtatgtcatcaagaacctacagaaaggttacaaggtggagctgctagggttcggaaccgtctataaccgcttcgtcacggagaagggggtagcgaccgcccccgaggtcaaggctacgcatatacggactatcgtgccgggattctcgccttcctataccatactgaacggggcacgacgctactcgctgctgggcgagaagacttcgttgctcaaggtgacgatactcgggacgccggtggaggaagggggcggttccgattctgagtcgcctgatgagatctgatgtgtcacttttggcttgacccaaaagtaaccaaaaggtcaaggctgacgctgacgggctacttcgagacctacgctcgctgtcgcatcccaactcgcttcgctcagacagggatgctccgggcgctcgctgcggtctcttcgcttgacgcccgtccgctgaggccgtccaaaggaaagccaagctttcctcttatatcagccgggattcctaattcataattcataattcataatttaaaattcataattcatgaaaaagtccgtatggagtaccattatcaaagtgatcatcgccgtagctaccgccatcgcgggagcacttggcatccaatcctgtattctctaattttcaatttcaattatcatgggtaaggtttattgtttctaccagaattacagggaggtcagcctccttgtaattcattgctcggccacacgatatgacagggattttcctgtggaggtgctccgttcatcgcacaaggcacggggattcgccgatatcggctatcatttctatatcacacgggacggggaattacaccgctgccggccggtcaatcagatcggggtgcacgcagccggatggaacgacaaaagtatcggtatatgttacgagggaggactcgacgaacaaggccgtccagctgatacccggacctatgcccagcgctgtaccttgatggacttgttacggcaattaaaaagggactatccggaggcacgcatccttggacattatcaattaagcccttatatacacaaggcttgcccctgcttcgatgcgagggaggaatatcttactttgtaaaaataccgccaacctctttcatctcttgttctttatgatacttagaaatgaaacgattgatcgtcaaatggagaagagaccacaggaagaggttcaagaacaagaggtatgtaatattcatacgcttggccaacagcaagttcaacgctatgaagaagatcgatacgcacagaatcgtcaccatcaccatccgtacacgcatacccgtacgaagcagcttgtgatggaaatgattcttatcgggcacgaacgggttacgatgattacgaaggcgatgaagcaccacacggatcacatcgagtaaagggaccaagaccgtggagaaagcgatcaccatatagggatttggcaactccggtgagacttggttcgacacgcacagatggatgatcaggaaactgatcacgtagcccagcgtaagactacccgcatcacccataaagagcttatggccacggtttgcgttgccaaagacgttgtaacaccaaaaaggcatgaggactcccagcgtacagatggccaacaaggcgtacacatactgcatgcggataaagaagatcacgctcaagaccgacagggcgatactgcacaaaccggaggccaagccatcgataccgtctatcaagttaatggcgttcgtgatatacaccacgataaagaccgtgacggggatccccacccaagcgggaaccgagtacacaccgaacaagcctcccaaggaaccgaaccaattaccggacagtactaataataacgccgacacgatctggacggcgaacttgtaacggtagccaacacccactagatcgtcgcagacacccactagatagagtaacgtcatgcccacgaacagaaagagatactcatagagcatgttgaacgacaggctcgatgagcccatatcccaaaagtacaggcggaagcctatcacaaggaacatggacatcaggatcaccggaaaaaacgacaggccgcccaaacgggggaccggcgtcgtatgtaccttacgggaatccgggacatcatataaccgtttcttgtgggagatcaccaagatcctcgggatgatcaccatcccgaacagcacggagaaaaggaagcccgacagtagtagtaatgttatttgcatgatttgcgtattagttatttcttcttgtcaccggcctcgaaaccgtaaccatagccgtagccataaccgtatcccttgccgtagccgtatttcttgccgtaaccgtagccgtagctgttcttgcgcttcgtcatgtccaagccgttgatcaccgtcgcgagcttcgggaacttacgctcacgccgcaacacgttgatgtagctgaaaccggccttcggtgtcacgtccgcacggcagacgtacacgcacatgtcggccacacggccgatgatcgccgtgtccgtaaccatgccgataggggccgtatccaagatgacatagtcgtaccgttccttcaaccgggcgatagccctctccagcacgtcacgggcgaccagctccgtcgggttcggggggatgggaccgcccgggaggatatcgaggttagggctgatatcggatcgctggaccatgtcgaacaactccacgtgatccgggtcgctaaggtagttcgtgatgccctccatcttacgggagatattgaacaccttgttcaggcccggcttgcggatgtccatgccgaccaccaccaccctcttgcccaagtaagccaagctcaccgccaagttgccagcgacgaaagacttgccctcgcccggttgcgtggagctgaaaaggatcacacgctcgtccttgcctagcatgaacaagaggttcgtgcgcaacccccggaacatctcctccatcaggtcgttcttgttctcacgcaccacgatcgagccctcacccgtcttcttgaccaacgggagctccgccaagatagccacgcccgtgatcgcctcgacgtcctcacggttctcgatcttgtatttcaacaggtcatgaaggtagacaatgcccaccgggatcgccaggcccaagatcaacgccgcaagcatgaaaaccatcctcttcggggcgacaggacgctcatcggcgagcggctcctcgatgatgcggccgttgtttgccgtggctgccagcgtgatggcgttctcctcacgcttctgcaacagcatgatgtacaacgtggccttgatctcctgctggcgggagatcgtcatgaactccttctcctgcctcggggcgtcgctgatgcggctctcgaacttgctcgcctgacggtcgatgtccgccttggcgatctggagacccttcaagacactgttcaccgtcgtcctcacgttgcggcgcatagcctcgatgccggcgttcatgttgatgatggccgggttgctgtccgaagaggtgcgcaacaggcgcttgcgctcgatgatcatcgtgttgtactggtcgatgacagaggtgaggttttgatcccgcaggcccacgttggcagggatcacctcgtccatgttcgcaggatcgtcgatataattgcggagatactgcaccaagttgatctgcgtggcgttctccgtacgttgttgctcatacctcgagctttcctgcaaagccatctgggcgtcgctcgtcaaattcgtcaggccggagcgttgcttgaaggcagcgagctcgctctccgtagtgcccagctcgccgttgatgatgccgatgcgctcctcgatgaactcagccgtcttctgcgccacctcgttcttctcgtcgttggcgtcctggttgtagaacgacaccaagcgattgatgaagtccacgcctcgtcgcctcaccgtgttcctcaaggataccttggcgatcgtcgtcgtcttggacgagggcgtcacgctcaactccttgccgtaagcctcggcagtggacgtgggcgtatggacgtgggccaccagctcgatctccccgccctccaactcgggtatggaatccatgcccgtgaaactgaaaacccccacgggggtgggcaatatggcggggagcctgtcgaagccctgcttcatcgtctcctcgtcaccctccttgtcgatcttgtactccgctctcaccgttagctgaccctccttcgtgtagcgcatgcgcagctcgacgggggccaccagacggtccgcctcctcgggggtgatgaacacgttaacgggggagttcttgtataacggggggttgaaacccaaggcgttcgactcctccatgtcgatatataggcccatgtcactcaccactttcttgatcaacgtgcgggacctcaggatctcgacctcgttgtcgaagttgctcgtcatcgagagcatgccgaggtcctgtatggcggcaaggccgctggcggcgttagcccccttcttctcgtcctccttgatcagcaccgacgacgtgacgttatacaccggcgtctggtaacgcaggaacacgtacatgccgatacaacaggccagtacgctcgccacgaaccaaggccaataaaccatatacttgaaaaacacggcgtaaagattgatctcacgatcctccccctccggattgttattgttattattattattgcttgtatttataccatcgtccaccatctctctaaattttcaattctcaattctctattttcaattatttaagtatgttcaccaacaggccggcgatcgagaccaagatcgagatcgagctcacccacaacgtcgtgctgttaccgatatcggagttcttcgccttcgtctcgttcggcgtgacataaaggatgtcgttctgtttcaaataataatacggggaggtcacgattccggcgttgttcaggtcaaggttgatgatcttgcgcttcccgctctcgtcctcgcggatcagcttcacgttgtcacgtacgccgtagatcgtcatgtcgccggccatcgccaacgcctccagaacgttcaccttctcgttcccgatcgtgaagctgcccggacgggccacctcgcccaagaccgagatcttgtagttcgccatgcgcaccgtcacgatgggcgcctccttcaagtaaggcctcaatctctcacggatcaggctctccgcctcgttcttcgtcaagccgccgaccctcagcgtaccgatcacagggaagtcgatctcgccggagttgttcacgaggtattgctgcaacgtgggttgcgtcgtcgtgttgatgttcgtcagggccgcgttcaacggggtctgcaccgtcaggttgaacggggcagccgcctgagggtccgtcgtgttgaccgtgatgctcaacaggtccttcggcatgatcttggcatcgtacaacgggagaatctccccgaaatcgttcaccacctccgggttctggaggtagggcacgttcttgtaggacgtgcacgccgccagcaaaaggggcagcgagaataggaacagtagtcttttgatcttcatattattttgttatcgtttttatttctttaaacacggatgacacggacttaacggaaaaggcgggacaggaaacctttgggtttctccggctcgtattccgactcgtatttacgcgtcaagtcctcatagctcagtcccttggtcaccatctcgtagatcgtgccccagtccgggaggccgccgaggttgcggtcgtcgatgaaaacgtccgccttcagcttgcgggagaagtggttgttccggtctctctcctcctccgggtagtcacggttcaccgcgtagaactccaagccacgctcacggcagaaggacaacgcctcctccaagagcccgccctcacggaccgtccaaaggatcagcttatgccgatccgattgcaatttcctcaacgtctcgatggcgaaaggaagctcacgaccgatcgccggatacttgtgctcgacgatcgtaccgtcgaaatctaccgctattatcatctctttaattctcaattttcaattctcaattataaaagggccggaccaccggacggccggagtggtatatgttaaagcggggtcagcctatcggccaaagccaaggggtctcctagccgctagagacggccattgccatccgggggatccgaccgtttcttttctgcccttatctaattctcgcttaaccggggcaatccctccacctcgccggcgtgccattcacggtagtccgccaagggaagcccggggacggtcaatagcttgtaatccgacccgtctcttctcaagatatgcttgcgagtatatgagcggagcgagcgatccgtaacggacaccatcacgatcgggaacgggtaggcgaacaggcgcaacggagtggtctcgctatccgggaacgcacgatgcagctggtaggccgaacgctcgaacgctacccagtagggacccgtgcaatacaggtgtattgagtttcggttcgcacgctcacgatccatgatctctgtcaaacgctcacgcaacaggttcatcagccggatgcccgaagggacgccgcatgtctctctctcttctctcatatcttttattcatcgccgttcccgtgcccgaaccagcggtcgtaatcccgtaaacgacgtatcaacacggacttgctcctcttgggcgaggcctcctccatccaagggccaaccagctcgtgcgccatgcgctggtagaggctgctgtccgtacagccgtacagcgtgaccagcaacaaggcacgggattgccccgcttttatcaccgggagcatgctgcgcatcgtggcgtgcaaacgatcgaactcatcctcctcgcccaaaagcttataggcaggaagaagcaaagagtaaagcttgcaacggatcacgtcggtctcaccacggagagaggcgtagccacgcaggacctcacgggccagacgggcatcctcatccactaccacgccagaggcgtggtaacggcccaaggccccgtgcaagccctccgacagacggtcgttgtccaaatgggtatacacgtgcttgccccccgtgttcagctcgatcaactcgtactcccccgctctcacctcgaacaaggggacccacagacagtcgaggatacgcaccatcacgtccttatgcccaccgcccggctgcaccaccacctccgcctccatattggaaaaagggccggaggtgatacgcacacggtcgcctttcaacaagcggccgctatctggcacgtacaccggaagctcgttggagtaagaagccgcgacccaacgcaaggtatccatctcacgatccgagaggtacgggaaataagaccgcccgccggaggaaacccgggggaggaaattatacaggggaagcgtacgcttcaggcggaagatctcgtcctccgaggcgtggacgaacacgtagttgtacaacaggggttgcctcgtgttgaccatcttgccgcccaccttcctcgcctcgacatacgagggggagaaatactcgaacaaggcctcaccacgacgctcacggcgggaaagctcagcgtccagccccttcgagggactgatcctgtcacgcccgccaccggcggtagggagcgtgagcacgtaccagcggacggcctcctggtcacgtcgcttcagaacatgcgccatgaacctatccgagcacttgcctgtcaatatatccatctctatgattatcttttccagtggttatcccgtggcccgaaaacagaccccacggcaattcagagccctaccaagaatcttttatattatcttgataaacagtactttatatttttaaatgtggcattactgaaaattaccatctcttgaaatcttaggctacttggggagtagcgtattctttcacggcgcaaatgtagtaaaaaataactaaaaacaagcaaacaaatgcgcttgtttactcattgtaggcgtttgatcctctctattttttgattttcctgttttatcctagacgtatagacatggtgatgcgggtgaaatgacctcttgttcccggtatcattccaccatgccttataacctgtgtgtattcctgtagagacggggcatgccccgtctcatcccctccaaatggtaacttaaagctactatcagacagtgggagacggggcgtgccccgtctctacaaccgggtgataaccgttctcgcaccttttaggctactccccaagtagcctagtccctttaccctactttcggtacatgattgtacacactctcaaaacaaattttattcaccgcagacatcttttccaacgagaaacttttcaaatagatttgcgtagtcttgatcgatttatggcccaatagttcgctgatcatctcaatcgggacatcctgttccttcaaaatcatcgcaaaagaatgacggatcgaatatgaggtgatcgggatagacacaccgcaggctctcgccaacctcttcaaattccggttaaaatgggccaaagcggaagtgtactccttgtaggcttcttttcccacttttatccctttcaagaaaggaaacaaatagggtgagtccttacctacatcacttgacagttccctcagcgactcccatgcggtagattgtacctctataagcatcggagtacccgttttctggcgtttatattccaaaaccccaccccggacattctcctttttcagatgagcgaaatccacgaatgccataccgcaaaactggaacatcaggcacaatgcctgccgtgtttttctcagttccggatcatctaatgaggccgtcatcagagaacgtaataaatcctgtggtaacgcctttttgcgtttgctctctatacccgtgaaaactcccttaaataaataagggatatagggggccagcccttcctccaccgccatgttgtacacacaacggatccgacgcatataggtcgacaccgtgttccatgtacatcctttgttcaacaaaaaggcctgataacgccgaaggttctccttattgacatagatatagggaattacctccaacccacaaaaccgcatgaatgagtttaatgcatcctgatagctcttcgccgtggaataacgcccatccatacgcaacttatagatatacagactcattccttctactaaatcctttttctccatattatcgctatttttacgtgataaaacttagcaaatgtaatacagatccgggaggctgagcatatacaaaaaaaggcgaaccaaccagtccgcctttataaaatctccatttctagattatttcaatcctctattcttcagcaacggatccgtacccggttccttgccacggaaattcttgtacatatccatagcgtcgtcgataccacccggggtcaggacatatttacggaatttatcggcacattcttgattgaagatatcgccggtttccttgaatgcctcgaaagcgtcgcaatccaatacctcggcccagatgtagctataataaccggcagtgtagccgccacccatcgtatggttgaagtaagtcgtacggtaacgggaagggatttgtttcagcaaaccacgacggcctaacgtctgttgctcgaaatccatcacgttcaagttagccggaacattattcgtctggtcaacgaactttatcactttcttatccgccgcatcaccactgaccgcatggaaatccatatccagataagaagccgccagatactccgtcgtagcgaaaccttgtccgtacttaccgctcttatccaacttctcgatcaactcggccgggatcacctcgccggtctggtaatgcttagcgtacaccttcaatacttccggctcgaatacccaatgctccataacctgtgaaggcaactccacgaaatcacgaggaacaccagaaacacccgagtaatgcacgtcacggaacaagccgtgcaaaccatgaccgaactcatggaacaatgtattcgcctcatcagcgctcaacaacgcaggttgtcccggagcgggctggctaaagttacaaacgatcgttacgaccggagccacacgcttgccatccttataagcctgcggacgataagaaccgcaccacgcaccaccacgcttgctggcacgagggaagaaatcgaaataaataacgcccaaatgagagccatccttatctttgcactcaaaagcctgcgcttccggataaggcaacggaatattacggatcggggtgaacgtgataccatataacttattagctacatagaaagcaccctcacgaacattatccaacttcaagtaaggacgaacctcattctcatccaaattgaatttagccttcttggccttctcgaaataataacgccaatcccagccctcggcctcgaaattgccgccctctttcttgatctcggcgtttatatcggccaattcctctttcgctttcgccaaagcaggcttccaaacctcatctaacaattgataaaccttatccgagcttttcgccatacgatcctccaacacgaaagaagcgtaatcatcatagcccatcaacttcgctttcgccaaacgagcggcaaccaaatcacgaaccacttccttgttatcgttctcattattattattaccacggttgatataagcgttgaacatcttctcacgcaactcacgtttatcggaatattgcaagaacggcatcacgctcgggttctgcaaggtaaatacccatttgccttccatcccggcatccttagccgcttgagcggcgttagcgatcaaggtctcgggcagaccggaaagatcctcctgcttgtcgatcaccaatttgaaagcgttcgtctctttcagcatattctgtccgaaagtaagctgtaacatggagatcttgctattcaactcacgcaatttagcctgatcctcagcggaaagattagcgccgccccgaacgaagtccttataagtctcctccaataacttcatttgctccttatcgagacccaactcatccttcttatcgtataccgccttcacacgagcgaataatttcggattcaagttgatatcatcactatattttgacaatagcggcgacatctcacggcttaacgcctgcatctcatcattcgtattcacgctattctgtccaccaaaaacgatctggaccttcctaagcaacgcaccctgctcatccaaagcgacaatcgtattctcgaacgtaggctcctccgggttattcacgatcgcctcgatctccttacgtccctcttccatgccttgcaatagggccggtttgtagtgctcgaacttgatttgatcaaaaggtggaactccaaacggggtggtatattccgcaaagaacgggttctcaccctccacggtcttcttttcggaagtaccgcaggcagtaagcataacggctaatcctgctgccataattaattgtttcatctttactgattttttgatttatgagttataaattgttctgctcattttagccctctgttctccaacagcggatcgatgctaggttgtttgccacggaaattcacgtacatgtccatagcgtcgtcgatgccgcccggggtcagtacgtatttacggaatttagaggcaacctccgggttgaagatatcacccgtctccttataagcttggaaagcgtcgcaatccaacacttccgcccagatatagctataataaccggcggtatatccaccttccatcgtatgtccgaaataagtagagcggtagcgagacggaatctgacggatcagaccacgatcgcccaagaccttcgcctcaaatttctcaatatccaaatcggcagggatctctttcaatacatgataatccatatccagataagaggcggccagatactccgtcgtagcgaatccttgtccatacttgccactcttgatcatcttgtctacaagggcttgcggtattacctcgccggtctggtaatgtttagcgtacactttcaatacctccggctcaacggcccaatgctcatcgacttgcgaaggtagctccacaaagtcacgaggcacgtcggacacgccataataatgaacatcgcagaataaaccgtgcaaggcatgaccgaactcatggaatacggtctcggtctcgtcggccgtcaaaagcgccggttgtccctccgccggtttgctgaaattaaatacggtagtaaccaccggggctacccgtttcccatccttatacgtttgtgaacggtaaccgccgcaccatgcgccacctcctttgcccgggcgggtaaagaaatccatatacaatacgcccagatgcgtaccatctttatccttgcactcgaaagcgagagcgtcggggtccggtttcgggatgtccttgatctcggtaaacgtgataccgtataatttattggctacatagaagatgccctcacgtacatgtcccaactcaaaataaggacgcatctcgttctcgtccaagttatatttcgctttcttggctttctcgaaataataacgccagtcccagccctcggcctcgtaattaccgccttccttcttgatctcggcgttgatatcggccaattcctcttttgctttcgccaaggcagacggccagattttatcgagcaagtcgtacacgttcttctcgttcttcgccatattctcttccaatacgaaagcggcataatcctcatatcccatcaatcgggctttctccagacgagcggcaaccagctgcttaacgacctccttattatcattctcattattattgttgccacgattcgtatacgccttgaagatcttctcacgcaaatcacgcttatcggcgtattgaaggaaaggcatcacgctcggattatggagggtaaacacccacttaccatccagaccattctcttgggccgtttgcgccgccttgacgatcacgtcttccggcagaccggataagtcctctttattatcgatcactaattggaaatcgttggtctctttcagggtattctgtccgaaagtaagttggagcatggatatcttctcgttcagctcacgcaacttcgcctgcttatcctccggcagattggctcctccccggacaaaacttttataggtttcctccaacagcttcttctgttccttatccagatggaagctcgcctgattctcatatacggatttcacccgggcgaaaagcttgggatttaagctgatatcatccgaatgtttggataaaaggggataaagctcacgttcgagctcttggatctcgtccgtggtattcacactggattggccaccgaaagcatacattactttagtaagcaactcgccactttggtctaaggccacgatcgtattctcgaatgtcggcgcatccggatttgccacgatcgcctcaatctccttcgactgctcttccatgcctttcaaaagagccggcttgtaatgagccacctctatttggtcaaacggaggcaccccgaacggtgtcgtatactccgcaaaaaacggattgggtgtagcgccttccgctacatcgcttttctttgaggaggaacaagctcccaaaataaccgctaaacctgcggccataagcgttttattcatgccattgttatattagaattacaatggacaaagataacgaagttttgcgttacaattctatttcaaattgttattatttagaatccggaaaaagattttcacaattcacacaaaaaagatccccaaagggagatcttcccttcggggacccaatatgcattcattcaatgttcaatcgaatcgctctctataccgtcctcgatattttcattttcgatcgtttcttgtaaatcttgaatgtcattagacgtgtaatcatccgacaataccgaattggtagacatggtctcatcgtgaagatcatcgctctcatcccataacgttttcattatattctctggcatatctcttatattttaaagttatatgcttattcaacaacctcgacaaagaaattgttgttccaataaaaatagttcactaattttagcgagattaacgcaagaaataatatgaatcgaatttgtagtctttttggtattcagtatcccatcatacaggcgggaatggtttggtgtagtggttggcggctagcttcagcggttagtaacgccggtggattaggattgatcggggcaggctccatgcacccggaagtgctccgggaacatatccgtaaatgcgaggcggcgaccgacaagccttttggcgtgaatgtcccgctgatgtacccggaaatcgataccttgatgcggatattggtggaggaaaaagtgaagatcgtatttacctccgccggtaacccgaaaacatggacaaagtatttgaaggatcatgacatgacggtcgttcacgtggtaagcagctctaaattcgccacgaaatgcgaggaggccggagtggatgccatcgttgccgaaggcttcgaggccggcgggcacaacggacgggaggaaacaactacgatgtgcctgatccccgctgtccggaaagcgacctctctcccccttttggcggcaggaggtataggaaacggtcaagcgatgctagcggcactcgcactaggggccgacggcgtacagataggcactcgtttcgccttgaccaaagaaagctcggcacacgagaatttcaagaaactatgcttgaatcttaaggaaggcgatacgaagttattattaaagaaactgtctcctacccgtctggtaaaaggagatttcgctacggcagtggaagaagcggaagcccggggagcgtccgtggaagaattacgtgagttattgggcaaaggacgtgccaagaaaggaatctttgagggcgacctaaaggaaggcgagttagagatcggacaggtagcgtctttattctgggaggaattatccgtggaagaggtgatgaaagaattgatccgtgactttaagctatccttagagaacgtaaagacacagttgtgttcgtgagaaaacacaactgtatctgtggataagcacaactgtgttcaagagaaaacacagttgtgttccttatcataatcgatacttatacaattgcgccatgaccttttggtattggttttgcaattgcaggtagttttgcacgctttggtaataggtcgtcacatccacgaaatactcgatcatagagatttgcccggcctgtatagccttgttcaacaagaccaagctattctgccttttcagcacatccttatattcatcgatagatttctttaaggagacagactggtcatatagctgcctcaacccattctctaccgtgaaagaagcgctctccaactgcatctccgtatagcgggcctgagccttcgcctgtttcacgttattacggttcgagaacaacgggatggtgattcctaccaagaaaccattgaaacgctctccacccgaggcgggattcatacgataccctaactcaaagccgggcagacctttcgccttattcacgctcacctgccgaagagctgtcgtctggtcgctacgcaaggtctgtaattgcggatcggattgcatcgcctccgtccgcagctcatcaaaggaaagcacatccttatccggcaaggcgtaaaccgtatccgtaaactcgatagcgataccgccattcaaggtagccagctcctgcagcttggcaatacgggaagtctcgttcatccgggcctctgtccgggcgttcaataattccagatcgatcttgtttgtctcaaggatattcgcatttcctttctccaaacgagtcgcataaaaagcggaaagttgctcggcgttcctaagacgggtatccaataggttcttctgctggttcaacagcaccaaatctaggcaaacctctttcacctgcaacaagatttgctgacgaaaagccatcccttgacgatccaaacccgcggatttcgccttcgtcagcttatgcttccggacatatacggacgggaaatcaaagctttgggaagccacgaactcgcccgtgaatcccatcccttctttattcccccagaaatgcgaataagagaccgaagggtctggcaaattattatccaacttcgcctccagcttctgcgactggaccaactggctgttcgcctgtaaatccttattgttcgcctccacgctccggagcacgtcctctatagaagtctgggcggaaaggccgcctgtcaatacagacaaggcggcgactataatatatgatttcataaaacttattctttattcttgttcattatcagataaacaatcgggatgatgaatccgtttaagaacgtagaggttaataaaccacccaagatcaccgtcgccatcgggctttggatctcattcccgggaagatcgccattcaacgccaacgggatcaacgccaaggcggaactcaacgccgtcatcaagatcgggttcaaacggtctagggaaccttgtatcacggactcacgcaatcccattccctctccacgcaaatgcgtatagtggctgatcagcagcataccgtttcgggtagcgataccaaacaaggaaatgaaaccgataatcgccgggatactgatctcgccggaagtaagccataggataatcacgccaccgatcaacgccaacggcaggttcaacaagatcacgccgctctccttcacgtccttgaactcattgtacagtaacatgaagatcaccaataacgacatcaatgacgtcagcaataaggtacggctggccgccgcctcgctctcgaactggccaccatattcgatatggtatccctccggcaaacggatattagcctctacccgatcctgtatctcattaaccacacttcgcaagtcacgttccgatacattggcactaatcacgatcttacgttgcacattctcacgattgatcgtattcggaccggtcacggaacggatatcggccacgtaacttagcggcactttctgtccggcggcatcgatcatcagattgctaatatcatccatcgtggcacggctagcgtcggaggtcttcacggtcaggtcgaaactcttgccatcatcgtacacctgactgacggcctctcctcccaacatcacattgatatattcctcgaactccggcaggggaatgccatatttagccaacaactcacgtttcggggtgattgtcaactgcggacgctcgatctgctgctctaccttcaagtccaccagacccgggatcgtttggatagcggccttgatctggttaccgaccgtaaacatcaggttcaagtccgtaccaaacagcttgatagcgatattcgcctccgtaccggaaagcatagcgtcgatacgatgggaaataggttgcccgatctctatattagcgccactgatcgtagataacttcttgcggacatcattcatcacctcatcccgactacggtcttgcaattcgaaaggagcctcgatctcggaaacattcacgcccaaggcatgctcatccaattccgcacgaccggtcttccgagccacagtctttatctcgggcacttgcaacagcaacgcttccgcacggcgtccgatctgatccgactcgtccaaggaaattcccggaagcgagcttacgttgatcgtaaaagaaccctcattgaacgggggcaagaaactacgtcccaaatgaaagaagatcaccaaggcgaccacaaacaaagcgatcgtggtacctagtacccatttctggtaagccaacgctaactccaaagcccgtttatacaccaccttcaacttccgggctatccaagcctcacgcagttccttcattcccgtcgctttacggttcagcaaatagctacaaagcaccggggtcaaggtaagcgccaccaccgtagaagcaaacaacgccacgataaaagcgatacccagcggaaccaacatacggccttccataccactcaagaagaacaagggcacgaagctcaccacgataatcaaggtagagttcaagatcggcatacgtacctcacgggaagcgtcgtaaaccacctccaaggtagagcgttgctgatccggaggcaagagccggttttcccggattcgtttatacacgttctccacgtccacgatagcgtcatccaccaaggaaccgatagcgatcgccatacctcccaagctcatcgtgttaatcgtcaatcccatgtagtgcaatacgatgatagagaccagcaaagataacggcaaggctaccaacgagatcaccgtcgtacgtatattcatcaagaacaggaacaagacgatcaccacgaagaaactaccctcaaacaagctcttctttacattattaatagagttatcgataaaatgactctggcggaatatatccgtagagacatgtacatccgccggcaagttcttccgcaaatcgacaacaatctcgtccagcttctccgtcaacttctccgtactcgtatccggctgtttggtcacggtaatcagcacggctggctttgtccgctcggaagcggttcccagcttcgggcttttaccgccgatcttgaccgtagcgatatcacccagcgtaaccggatactcattcacggtcttcaccacgccctgagcgatctcttccgccttcgacgtagacaatacaccccggatgatatactcattatcaaactcatacaatacaccaccattggcgttccggttcatattccgacaaacatccaacacctcgttcaaccctacaccgtagtgcttcatacgagccgggtccaacaagatctggtactccttaatatcgccaccgatcacggccacctgcgccacaccgcccgtagacaacaaacggggacggatcgtccagtcggcgatcgtacgtaagtccaacaaagacgtggaatcggcggtcaaaccgaggatcatcatctcacccaagatggatgactgcgggcctaaggtcggtttacctacgttctcgggaaggctctcacccaagacagccagtttttcggacacgatctgacgagcccggtaaatatccgtaccccaatcgaactctacccaaaccacggagaatccggtggtagacgaggaacgcacacgccgtacgtccatcgcaccgttcacggcagtctccacagggaatgtcaccaagcgttccacctcctcgggagccataccgttcgcctcggtcatgatcacgaccgttggggcgttcaagtccgggaacacatccacgtccgtattaaacgccgtgtacgtaccccagatcatcagcaatagcgcacaaaccaagattaccaaccggttgtgcaatgaataataaattatcttatttaacatgcaacgtccctcctattaatggctatggctatgagccggtatcgcgttagaagcggaagacaacttgatctggtaagcgccacgggtcacgacctcatcgcccggtttcaatccggaaaggatctgtacctccgagccgttattcgctcccagcgtcacccattgcttcttatagccttcctcatccagacggataaataccgaataaacgccctgctcctcgataagggcggagacaggtacgctcaagacattctccatcggctttgtcaacaaaaagatctccacgaaagaaccggggataaccgctcctttattatcgaactcgaaagtcaccggtacatagaaagagttcatatcggaagcctttccatacgataacaaccgtccacgcaaatcagacaatttatagagagcgttatcatacggagtcatgaaattagcggtttggatcatgggaagatcgttgtaatacctctcagacacgtccgcacgcaataccaaacgattgttttgcgagatcgtagccaaaggctgacctacggatacataatcaccctctttcacttggatgttcttcaagtaaccgttcaagggagagactacagacacgcctttcgccgtctgttttcccgctatcgcctcataagcgaccttggcgttctcgtaattcaagcgggcctgctcgaaatccttggcggatacgatcttatcgcctaccaaggcttgcatacgctcgtattcctttttcgccgtctcataagcgaatttagcccttgccgccacgtctccatccgagagggcgttggaagcgatactcaacacggcctgtcccttgcgtaccgccgtaccatccacgaatggcaagctaccaaacgagatcacgccggggacggtagcgacgatcacggactcctccccttgcgccgccattactcgtccgctcgtcttaatcacatccgtgaaaggagcgggattaaccgttacggtctgcaaaccaacggcctcggctaaggctttcttaaagacaatctcgccgggatgggtaccaccggcctcatgctcatggtcatggccttcgtgttcatgtccctcatgatcatgatcgtgatcctcaccttcatgctcatggtcgtgagcctctaattcatgattatgctcatcgtgtccggcttgcgacgcatttcccgcacaaccggcaaacaggtaagcgcacatcgcacctaccaaatatattttcttcattgtgtaaaaaatcttgatattgttaataataaatagataggggcaagtctgtcctcacccgctctcacaaacgaggtatcaagacataggaggggcacgaagtcccgaggcactcactatccaagtgtcgtgcagcgactcaatgtagggggcgttctcgtgatcaaggagctgtccgcaaaacgccggttcaggtggataaatgtaatcaaataagacgagtaacggcatcagatgtatatccacatctccatccataaaatgagaaatatgcgtactgaaataggccaagttatgcccgtcgcaaccgcaatcatgcgtatcagtgcttttatcgccatgcgcttgctccgcagtcaaggattgataacaaggcatcccgtcccggtgatgatggtgagggataaccacagaaagcaatgccaagatgccggccatcagcaccacgtattgtacaatcctctgtttcattttctcacgcatggcacaaagataaggatatttttccgttttttacatgaatgttgtaagtttgcggtaaataaaaagatagatgaagtttggagtaaataaaaaggtattattatataccgccggttgcgtatggattttcgccggtatcaatatcttacgcatcggcatcgtcacatggttaaacgatacccattattggttattcaagatcggggaagcgaccatcgttttcttacttttcttcaatttggtctttaaacggcttttctataaacattccgaacggatctcccggaaaaacgggaaacattgcccgttctctttcttcgacgtgaaaggttggattatcatgatcttcatgatcgctttcgggatcacgatccgcacgttccatttactgccgaattctttcatttccgtattctatacgggattatccacggcgttgatcataacgggattcttattcttgagacaaggaaaaaccgttgggaattgagaattgaaaattaaagatacaacaatcaataattttcaattctcaattctcaattctcaattttcaattctcaattttcaattcccaagtttttcgcagatcaactcagcagccttcttgccgctcatcagcatgccgccaaagatcggtcccatacggaagctaccgcttacgccgttagcggccataccggaaacgaataatcccgggtagatctccttcgtgttctccaccgtcgtctgctcacccagctccacattcaaggaacgctcgccgatcacgcctccggtcggtgtattcaattggatatcattcttacgggctaccacacgggcgatctcgcaatcatgccccgtaccttccaagacagcctttgccatgatcgtcaacggatccacgtgcatcccctcacggattaccggagcccagttcactaccacaccagctacggcatcgttatgaaacaccacgtcctctaccgaatagcagttaaagatcgtagcgcccgccttcgtcgcctgataaatcaaagcggaagtggtatgtaccgaatccatgatatacgtgccgttagcaccctccttataacttacgcccaattccttgataatcggcatagcctcttcctgcaccacgatatcgttgaacatcatagcgccgccccacatacctccaccgggagccagcttacgatcaaacaacgccaccttcttaccggctttcgccaagaaataagcggccacgataccggaaggtccccctcccacgatcgctacatccacagacaagttgctcttcaacttctcgaagtaagagtcaatgattccacttgaaacaatctgttccatcttaataactaattaaagtttaaacatcagggagcacatagaggtaacgccccctttatttcctagttctaccttattttcccttcgccggcattacccggatcaggttcgatgggtataatctcagcccgtatgactcgggcacccctatgtgaaaagtcgggggcaaatgtacaaaaaattagtatatatgtactcaacagagccataaaaggcaaaaaacgctcagccaaacaaaatgtaagaagcttaatcttcttccgaccagtcatcagaccaaccgaattctttatcccggaataattcagctaatcccgaaatctgcttgaaccgaagtaactcatttttatccattccaatattacgcatgatccacttatcagacatcccagatttgaccaactccgtaacaatctccgtcataagttccaagttgtgcatccctcgagccctgttatggcgaatggttgaagccattcggtttgaaatatctttctcaatcaccgttacaggcaacattcctttctcacgatcataaatcctttgagattgcttcataaccagataacgatgataaccatctactatctcatataaatcatcctcttcaagataataacagacgcaaggcatcgtatagccatcctcccaaatggaaagttccaataatcgcatttccggtggtgccatgatattagggttatagctgttggctacaattttttctatagggacagccctaacaccatatgccggactaacaaagtttcccatgcttataaaaattatatttgtccattacttcttttctcatatccctttctcgttttgtctgggaaaaacccatatacttacatgtatgatcgtttttcaaaatacaaacacacatacgtttgtaagtagggatttctttaaactcaggtatattgatatcatcgatatactccatccgtaccggtttcttatccgtatggtaagcggtacattcttccacaatgataggaatattagccgcccgtaacttagcgatagtctcctcactgaggcatcctcctttttctctccagaatttacggctgactcttaacttattcaaatagttctcacgagtttcttcgggtaaagtatttaggagaaaatacatatatttctcccaagagaacccggctgggcacttgatagccctccatcccatagcggaggtattcccatatataccggcaaagccaacaccgtttacacgtccaaccatcctcccccacatgtcgggatcgacaactttgtaaatgaacagtgtggatatcgcttgggatatgaatgggctcgccacacgttgccgggacaaaggcacccctgcttgataatacaaatcatacaaatgattatatgtccaaccgaactttccgttcgctatccagatatcctgagttttccaatcataaataggatatgcgttatatatagaataattcattctgcgagtccatttataattagctagttttctgtaattcttatcactatgtatggcccgccacctattaaaactctcttgggtacggataccaacaaggcaacatatacgccggcccattttccgttgatacaaccaaaaagggaacatattctgaaaatcataatcccacatgtcctccttgaaaaagtcaaagtctttcgcccggagacatgaatggggcatctctcgaacccagatatcccggtactcctcgctccaaggtctccaatattgttgaaacatagatgtacatgtctggactttaaaaggaacacaacaatgataaatatcaaggatatcggaattagcggcataaaccttttccacatattcggtcgtctggctgtattgaacctcataatccatatgaaatacacctaattttcgtcccggagcgtatctacgaatataatctacacacaaattcaacagtacaccactatcctttccgccggaaaaagagacgtatacgtaatcgaaataatcaaaaatgatcttcaatcttttctctgtcgcctcgtacacatccattcttcgcatcatgactctacctccggtaaataatgcattttatcataatttttccactcaacacatgtctggaactttttttgtgagaacacttttacatgacgtttatgcacaacagccataagtgaagcttgagatgaaaaatcctttatgacttcttcaagaagttcactcaataccgaaggatcatcaccactcacgaaataattgtctatagagtaatagagatgtcctttttttacaggcataaaaccaacaacagctgtttcatgaaaggctatataccaaacgtggctacgagatgttttaaaagggtaattgttattttgtcgcaaaatggctggattcatgaccaaaggtgcgacaagttcatataacaatttgtccgttccctgcaatgtcataattttcatggtctgcacttaataatattaccatgcaaatttaggcattatatatagataccgtagccacaaaaacacaaaaatgtaatttactctatttatatttagtcactcgctcataatcgataacgcctttccaattcatacaaaaagcgaaatcatacagatggccctcgctatccgtatagcatttcatatcccggggaacatcttcgaattgctcctccacgatacgcatatctgccggcatctgcaaaggcaacaaagcggaaggctcggcttttccactgatgatatccaagaccgcttggttttgtacaccgaagttcaccagaatggcatccgccgaaccctcgaactcggacataatcgtaggcttatccatctccaaagatacgattacaggcttaccttccattttagcctttgtctccaaaacagagagcatatcctgcttattagctgttttcacggacttacctttataagaacggttcgtgaaattctcaaacggatctccccccgccaaacttgggttacgggcataggtagcggtataatcattatactgtaaactgataggcatataaccgtttccacctttctcacgatcggatttatcataccccgtaccactgttcgggctcgtcataaagacgatggcgaaatccgcctcatcgggattatcaacgaccgtaagataccgtgaccgatgccctccactaaagcttgcgcattattattccagcgagccgccactttcgggctttgcactctcgtaaccaatacatgacgaacattatcctcggtgaggaatttacgctgcgcatcggaaagatcggatggctgggctccactctcatcaaaagatttgccattgtaggtagaagttccaaaccctttcgaggcaccggggatagattgatgggcgctataaagcatcaatccggcgatttcctctgtagatactgtccggccaaatcaacggcacgttcctcgggcgtaagacgccaatcctcatacggatcaagccgcccgttccgattcagatctttgaaggcatatccgtcaacagtaagaagtctcacccccgaattggcggaatatcctaatacagctccttcttgctgggtaacgatacggatagaatctttctccacctccgtccacttcgtgcccgaacaagcacaggtggaaactaacaaggcgcccaacataccatgagtcagccgaacagtaataaaaggttttcgcatactttcttagttttaataggttaatctctattcaataatggtttctcaagaatacgatttatccgaaatgagacggacgcttattcaatctgcgctcgataaagcttttcataaattccacggtctcgtcgatccctaatacggatacatcgatcgagaaattataagaagaggccattccccatgtcttattcgtataataattatagtaagccgcacgggatttatcagtcttctccatcatgttcttcgcctcttccaccgtcacaccatgcctttccacggtcttttggacccggctctccactgaactatggataaagaagctcaaacaagccggattatcccggaggatataatcagcgcaacgccctaccaaaacacacgactcagtctccgccaatttacggatagcgtcactctgtatcttaaaaagaccgtcattagacaaaatatcattataaggcgtaaacatccctcccataaaagaagaataccccatcgtaaaagcgtacgataaaccactggaggcacgttcgtctgccttctcgaaaacatcctcgcataatccactctcacgggccgccacggtaatcagttccttatcatagtaaccgatacccaactccttcgccaaacgttgtccgatctcgcggccaccgcttccgaactggcggcctatcgtcaatatgattttattatccatagatttcaagtttaattcaaccatctacaaacgtacaaaattatttttaaagccacgataataatataataaacactaaaacaaaaaataatcaaagtttatacttacatttgttttcgaataaatttagtacactcaatttatcatgaataacattcattccaatacaacatttcttaatgaggctatagacaagaagaccgatgtagaagatgaaaagaccgacttgattttggccaatatgattgatttgcgaaaaacgatgtcggatgtattgtcacttcttcttggagccaaaaaaaactcggttattgaccaagcgctattccgcatcttacaatttttcgatgtggatcgggtgtatatcggaacatttgacgaacaaactcatactgttgattttacgaatgaagttacttgtgatggcattatctctatgcgagaggatttactgcgtcaactcccgcaagacgagattccttggtggtacgacagtatcaaaaagggcatggatatcgttattcatgatgtctctaaaatgccggaagaggcgaagagtgagcagcatcttctgattttgcaagaggtttcatccttattagtcatccctattttcaagcaaggcaaaccatccggatttatcggctttgattctgtaaaaaagaaacggaactggagtgccttagatatagagaacttacatatgttggctgatatcctttccatagccattgaaagaggggaagttcaaggattagtagaacatacggctatgcaagtcatgaaaagcgagacgaagtttaagatcattttcgacaagatgccttggggcgccgaactttatgatgagaatggagtgttggtagatatcaaccaagcggatctcgatatttttggtgttacccgtgagcaggccgtgggactgaatatgttcgagaatcctaatatcccgaaatatgtaaaccaaagcctcaaaaacggaaaagatatattctttcctcttaattatgatttcaaggttgcttctcaaaacggctattacgatagtcatcatgattctaaaacaaagcatctgttggtaaaaggagtcacattaaaagactctcttgataatatattcggctatatttatattgtattcgacgataccgagaatcacatcaagcgggaacaaatcgaaaatagcctagcccggctaaaagtatcagtagataccggggattccattctttgggaatacgatgtagagaatgataaattgaccgtagattttggcctcaatgaagacattaataataatgaggggctaaaagcgattcatgattacaacttcaagaatcaagaagactataaatcctcaatccatccggatgattttgaccgggtatataataaacagttcaaacctctcctgcaagggaagatcaataacttcgtagcggcctacaggcgtatcctcaatggcaaaacattctggttcaactccaatgtacgctcctataaattcaacgatgacggaacgcctaataggatcgtaagctatacctccaacataacccagcaacgggaaaaggagatcgagctaatcaaggtaaaggaagctgataaattgaagtccgcattcttggcgaatatgagtcatgagatacgcacgccgctgaacgctatcgtcgggttctcaaatataatcgccgagattgatgatgaggtagagcgtcaatcttatttagatatcattcataaaaacaatgatttgctactgcaactgatcgatgatatccttgatttctctaaaatcgaggcgggaaccatggattatcatttcgaggaagtggacatcaaggatatatgtggcgaaatcgcattggcagactctataaagatgccttcagacgtggttcttatctttgatctcggctccccatccgtaatcgttaaaaccgatgagcggagggttatgcaagtgatatctaatttcgtgaataacgctatcaaatttaccacaaaaggaagtatcacgatttattatgagatagaaggggattttatccgagtctgcgtgaaagatacaggtatcggtatctccgcggaaaaccaaagacgtatattcgagcgattcatcaaggtagatactttccagcaaggtacgggattgggattaaccatcagccgaaccattatcgaggcattaggaggtaaaatcggcgtagactctgaagaaggggtgggttccactttttggttcactctgcctttggagacaaaacggactgatattgagctttcaccggatatccccgtccaatccgaagaaacgccccgttcagataggcatcattccatcttaatcgccgaggacgtttatgagaattatttccttttggaaaccttgtttggcaagcaataccaactttatcatgcgctaaacgggcaagaggctatcgatatgttcgagacatatcatccggacctaatcctgatggacataaaaatgccggttatggacggattcgaagcgactcgcagaatccgcaccttatccaagaccattccgatcatagcgctcacggcattcgctttcgaaagggaaaaggagatcgccaaacaatgtgaattcacggattatgtagtgaagcccattgatataaaagaactaaagaaattaatcgttaaggtattggcataaaaaagcgtgttgcgacaatcgcaacacgcttttttttacttaggcatcggagcggcagaaggaggaggcgttcccaatccccattccttattcgctttcggccccatctctaactctaacaaaccaccagcggcgatatcgctatgattgaaccaaggctggttcaaggttacgccgttcaacttagcggattgtacgtatttattctcatcggatgcgttattcgcacggatctcgaacgtattgccgttacccatatccactttcacgtcggtaaacatcgggctaccgatattataggtaggagaacccggagtcaccggatagaatcccatctggctgaaaacaacgaaagcggacataccaccaccgtcctcatcgcccggcacacccatcaaatcattgcggaaccattgattcaataaggtacgaatacgtttctgggtcatccaaggcttacccgcataattatacaagtacgggatatgcaagctcggctcattcgccatagagaacatacctacgttacccgtatgatccggaagcgtggaatagaattgccatttagacatacccagcggcgtattgaacatggaatccaaggcagaggtaaacgcctcattgcctccgatcaaagagatcaagtcaccgatattatgctgtacgtcccaacgataaatatatccgttattctcatcgtaataatcacgggcacctagaccgccatcataacggtaatctaatggatagataaacttgccatccttatctttcggatggaagaaacctgtctccggattaaatacgttccggtaattgtaagagcgacgcaaataataatccgcctcgtctttctttcccaattcttgagcgatctgggacaagcaccattcatcatacgaagtacctaaagtcacggcgatcggctgacgtttttcccaaatggatacgttaggcaccgtctctttctctcccggtctcaatgcgggaatatagccatgttccttgtagaaatcatccaaccaaccggcgggagcggcagaccacgggatcaaggtcttttcctcgatacctttcttacaagcgatataggctttttccagctcaaacccacgcaagcccttgcggtaagcgtcgatcacggtagcgacagcatggtttgagttcatacggcgtgtatctcctgtcacctccgggaaggtaggcatccaatcggtacccatctgctccgccatcaggagataagagttgatgatatcgttctcacgctcattatcgatcaagacacgcaggggatgtgtagcacggtaggtatcccaaatccagtcgtccgtatagaaagaccgtccaccatcctcatggatctttccgtcgaaagcactgtaataatgtccgtcctcgctcaagtttatcgggcgttcgtagcaacgatataaagaggtatagaatacggtcttctcatccttggtaccgccttgtacttgtattttacctaaagcgtcgttccaatcgttgcgggcgatcttcgctaccacatccacgtcgtaagcggcgatctcacgctccagattcttcttcgcctgttcctcgctgataaaagagataccgtagcgaacgccaagtttcttcacgtcctccccgaaggaaagggcgatagcggcattgataccttccacggaagtctcgttatagttgacactgccgttcgacaatacccccgctttcacaggcttctggttcgtctcggcatataaaaagactttcgttttcttatctatatattgataaccgcttacggcgttaccatttacttgtagctgtccgttacggctgttaaataccagataagccggtccctctttctcgaaagtgagcgaatatacggcactttgatgggacggggcgaagtccacgtcgatttcctcattatccagatatacctgataacggtacggcaaaatcttctcccggtcatagctataagcgatcacgggtcgcaagccggattcgtcaccttgataagggcataaattgaacgcagaacgctcacgatggtttgtcacgataataggcaaaccgcccagacggtcacccgtgaagtccgcacgctccggatatacacgtagcatactgttcggcaaatgcacggtcgggaaagtaggcaccaataaatggctgatgtttcccatataaggattcacgtaatccaccgggtccatcgcagaaggagaagtccctccgccaccggcacatgacacccacaggaaaacggaagccaaaagggccatcgaagttttaagctttgtcttcattttgtcgattattaattcgttaattattctttgctcctcagccgggtactttcccggcaatccgtgagacgttgtctcacgggtaacagagcaaaccgctcactggtaagggagctatttactcagccgtcttcggacgattttccggggcagctccgaactccttattcggcgtgttgcccatcacaaaggtaagattccctcccttcacgatatcatcatacagaatataagaattgttataaggtttaccatttagcaacacggattggatatatacattctccttgctgttgttctgggctacgacctcgaaagtcttaccctccggcaaatgaacggaagccttatcgaataacgggctaccgaacacgaatacgccattggaaggattcacttggtaaaatcccaaggcagacatgatatgccaagcggacatctggccacaatcctcgtttccgatgatgccttccggctggtcggtatagaacacatcttgaatgtaacgaactttctcggctgtcttccattgctcgccggcgtaaggatacaagtaagtaacatgatggctcggctcatttccatgggcgtacatgccgatcaagccactgatatccggagaggcgttctcccctaactcaccttccaccaagaacaaagaatccagtttcgagataaacggagcgtcaccacccatcaactcgatcaagccttccggatgctggggcacgaagaatgtataatgccagccatttccctcacagaaatcgcctacgctatgtatggactggatcggatcgtacggcgtacgccagctgccatcattcattttcggacggataaagttgatatccttatcgaaatactgcgtataatatttaccacgtttcaagtaattttggtaatcctccgtcttgcccatttttttcgccatcaaggcgataccccaatcatcagcggcatattccatcgcgatagaagtagcctcacgtaccttatcacaagggatatagcctttttccaacacgtacggcaccccgttttgcttctcatagacagatgaagcaaccatataacgatacgcacggtcggcgtcaaagccggtaaaacctttcagataggcatctgcgataataggcacagcgctatatcccggcatttggtccgtctcaccaccaatcaacggccagatcggtaatttctcttgctggtcgtaaatgcttaacatcgagttcaccaaatccgacacatattgaggcttgataatcgtgaacaacggatgcaaggtacgatacgtatcccatagagagaaagtggaatagttcttccaagtattgttcgtatacaccttatcgtcatggccacggaaatcgccattcgcgtcgcaatacaacgtcggagcgataaacgcatggtacatggcggtatagaaaatcttcttggcacgctcatctttcgtatcgatggagatacaagacaattggtcattccatttatcgatagcctcgttacgaacctcgtcgaaatcccaatgagaaagctccgtacgtaagttagccaaggcattttcacaacttacggaagagatagcgacctttaccaaggcggtcggggcatctcccttaaaggtaatcactcccttaacggactcgcccgtcaactcatcattacctgcggcctcatcatcgttgaatacagccaaagactcgatcggctgatcacatttcaacgtaaaaaatactttgtgacgtgggctccaacctttggaaaagcggtacccctcgatcgtgtactcatcaatcttcttcaaataagtgtcatacgctttatcaccgataccctccttcaagttgatcaagaggcgatgctcactttccgacggatacgtataacgatgtaaggctacacgctcggtcgctgtcaactccgcctttacgccattatccatcagcaaagagtaatatcccggagctacggcttcgttggcatgtttataataggaagaagcggctccctctatattatcttgctcgccacgggcggtacgtacctcgcccgtataaggcatcagaaggatatcccccagatcagaacatccggttccgctcaaatgcgtatgactaaatccgataatgatactatcggagtaatgataaccggaacaccagtcccatcccttaaaaatattctgaggacctacttgaacagctccaaacggaacgttcgccccgacaaatacgtgtccgtgttctcccgatccgatataaggatctacatatgcggtaaagtctgtcttgttttccatcttctccggtgtagcacaggagtatgcgaaaaatgtcaggcatatcgctatgcctgacatcaatggtttatgaatgaaattcatcttaattgcttatttcttctttttactaggttttacagaaataggggaaagtttattgatcccttcctcgtttacggagaatgagtaaggcatatcctccggattaataccacgattcatattcggcttgtcacccatcttgaagtcaatcacgccacccttaaacaaatcgttatgatccaaataattcttggtgtagttcttgccgttgaacgtcatagattcgatatagatattcttatcgctgttgttcggggcgttgatcaccaagttgtttccattctcaaaatggatcgtagccttcttgaacagcggagcgcccaacacatattgggtcgtacccggagctaccggatagaatcctaacgctgagaatacataccaagcggaagtctggccattatcctcatcaccgcaataaccatccggacccggagtatacatcttattcattacttgacgcaaccaatattgagccttccaaggttgacccgcatagttgtataaataaatcatatgctggatcggctggttaccgtgagcgtagttacccatattcatcacggtcatctcgcggatctcgtggatcacaccaccgtagtagctatcatcgaacaaaggcggcacagcaaatacggagtcaagcatcatcacaaatgaatccttaccgcccatcaagtcgatcaatccctgaggatcgtggaatacagaccatgaatagtgccagctattaccttccgtgaaagcgtcaccccatttcagcggagagaacggagccatgaactcgccattctcattcttgccacgcatcaacttggtttccttgtcgtacaggttcttatagttcaacgcacgacgggcatataaatccaattcctttttcggacggcctagttgtttagcgatctgccagatacaccagtcattgtaagcatattccaatgtacgagcggcattctcgttaatcttcacatcgtaaggaacatatcccaacttattataatattcatgccccagacgtcctgtagaagaaaccgtcggatgaacgttttccgtaccatggatcaaacctttatatagagtctccaaatcgtcaaccttcacgcctttcatataagcgtctaccaagatagatgccgagttattaccgaccatgcaaccacggtggcccggacttgcccattccgggaagaagccgctttccttatacgtattgatcaaaccctcttgcatttccttgtttacagacgggaacatcaagttcaagaatgggaacaaactacggaacgtatcccagaatccggtatcggtaaacatataaccgggtaatacctcaccattatacgggctgtaatgaaccacctcgccttgagcgttgatctcatagaacttacgagggaacaacaatgaacgatagaagcaagaatagaaagtacggtattgatccaaatctccaccttcaacctcgatcttgctcagatgctcattccaaacatccttacctttctgaaccaaagtatcaaagttatcgttacctaattccttcatattgatagcggcctgatcgaagctaataaatgaggaagccaccttagcgtggacgatctcacctttcttcgtcttgaaaccgataacggctcctacatggtcactcgtttgttccttcgttccctctttcaaggaagcgtcagcaaatgtagcctcgtatgtgaaaggtttatcaaactcgatcacaaagtaattcttgaaattatcgggaaccccaccgctattcttcgttgaataaccgatgatcttattctcctccggaattaccttgatataagagcccttatccaaggcatccaccacgatataagaatgctcgttttccgggaaagtgaaacggaacatagccgcacgatctgtcggcgttaattccgtcaccacatcatgctccgccaaatataccttataataataagccttggcgatctcccctttgtgagagaaccagctcgcacgtttatcttggtcgaactccggtttaccaaccaccggcatgatcgcaaattgtccgtaatcattgatccacggacttggctgatgggtctgtttaaaaccacggatcttgttagccgtatatacatactgccatccatctcccatcttaccagtctgaggagtccagaaattcataccccacggacgagcgatagccggataggtatttcctgtagacaactcataggaagattgcgtccccattagcgggtttacatactctactgggtcaaaagactcattcacagccgctgccgcaggtttccccacccacatcagcatcgccgctaaagctaaagcccaaacgctttttttcttcatgatatagctatttaattaataatataatttatccgtttttgtgttttatattcatagttagactacaaatatccatttaattaacatgaatagaaagtgatcctcgtgtcatttatttagaaatatccctttctttcttatgaatttctggcattatacgaatataggtgcaaatctaacaaaaagaattagaaaaaagaaatccaatgagccagatcatactctgttcatcgcacttttatcactatcgaaaaagattaaatatcacatgctagttccgtacgaactatgtctattctagaatataatattacatataaatgtaatcaatctaaacttaatttaaaacaagagcaaaatgacaaagaatgaatctaagctattatcccttcaagggatagctaaagcctcagcgttctgtttgttgctttccgctttttctgtaaacgccgccatggccgctcccgcaggcacggttgatgaagtaatggcagtgcagcaaggcaagaaagtaacaggtgtggttattgacggtacaggtgagcctgttattggcgctaacgtggtggtgaaaggcactacaaacggtacgatcactgatttcgatggaaattacacgatcgagggtgtgtccgcaaacgatgtgttggtcatttcttatatcggttacttatctcaagaggttcctgtaggtaatcaatcgatgatcaaggtgacattgaaagaggatacccaaacattggatgaggttgtagtagtaggttacggtacgatgaagaaatctgacgtgacaggttctatctctacggctaaaggagatgatttggtaaagaatcaaagctttagcgcattggataacttgcgtggtaaggtatctggtgtaaacatcttctctaactctagccagccgggcgcttattcaaaccgtgtggttattcgtggtatcgcgacaatcaactcttcttctaatccgttgtatgtagtggacggcgtagtaatggaaaacttcgacttggtgaacccgaatgatatcgagtctatggaggtattgaaagacgcttccgctgccgctatctatggtgcccgtggtgccaatggtgtcatcatggtaacgaccaaacgtggtaagaaagatggcgaaggtgtcgctattagctaccaaggttctgttagcgtgagctcgatagcacgaaaaatggatttgctaaatgcacaagagtggacagacacttttatgaaaggtctggagaatgagaacaaatggttaggaaccaattggtctttaaatcgtaccgattggtttaccgaccgtaattactttgatgcaaacggtaatcctatttacgatacggattggcaggatgaggcaactcgcacggctgtttcccacaaccaccagttgaatattcaacaagcgggtaagaactcttctatgggtgcgttcttgaactataccgatcaacaaggtatcatgttgaacacctataacaaacgtttgaacgctaagatggcttacgacgcagatcctacaaaatggttatctacatctgtaaacgtattggttaaccacacgtggggccgttatactcctgaagatggtggtggacaggaagctcgtcgtaccatgatcgaaatgttgccttggctacctgtatatgagccgggtacaaataagtatacgactagcacgtctccttctttgagcggtttcaacttggagggtatgtcaaacccagtatttatcttgaacgatcagcgtagaatgaaatataacacccagatcttcggtaacgccgcattgacattccacttagctgaaggcttagacttgaagactcaatttggattggatagccataatatcacttatcgtggttattcttctgtcggtttgaacaatatctctatgccgaatggttgggccgaatatgagaactggaatactttgtattggcaggaagagacttatttaacctataataaggtgttaggcgatcatcgtatcaacgctatggccggtttgtcttggcaggaacgtacttatagaagaaataagtctaaaacggaaggtttctccgacgacttctacgaggattacaatatgatcgtaggtacaacccctaaatctcctgaatccgactggactcgttgggcgatgaactcttatttcttgcgtttcgcttatacctataaagatcgttactccgctaccgtaacaggtcgtattgatggttcttccaagtttggtgataacaacaaatatgcattcttcccatcagccggtttggcatggaatgtctctcaagaggatttcttgaaggatagtaatttaatcagtaacttgaaactgcataccagctatggtttaactggtaactctgagatcgatccgtataagtctttgggtaagattaagtcggagactttattattgaatggtacacgtgcgccatattcctatatggaaacgatgccaaacccggatttgaaatgggaaaagaccggacaatttgatgttggtttcaatttaggattattccacaatcgtttgaattttgatgtgtcttactacaataagaaaacaaccgacttgctgttggattgtccggtgcctcactcaacaggtttctctacaatcttcaagaacatcggttctgttcgtaaccaaggtttagatatcatggtgaacggtactccggtacaaggcgaatttacttggaactctacggtgaatttgaactttaacaagaatgagattcttcatttgggtgacaccgacgctgatgtttacttgtacgactgggtaggaggtggttctatccttcgtgttggtgaaagtatgggtagtttctatggtttggtacgtaatggaatcttcacggaagaagattataaggctggcaaatgcgagaaaaaccaaatcggacgtccagaccgctcagagtctcgtgagatcattggtaaaggtttaccagattggactggaagctgggtcaacaacttctcttataagaactttgacttaacggttgacttccagttcgtatggggagttgagactttgcagcgtttcatgcactctacttatgaccgttttggtatgactaatggcttgagcaatattctgtatgacggttataacggtacaaatgcaggtacgatggagcaagctatcttcttagcttatgacaaacctcatggtggtggagatacaacgactgactcacaatgggtagctaatggttcttacttacgtttgaatatgcttcagttaggttatacatttgactcaagcgtagcgaagaaggtaggtttgtcaggtttacgtctgtatttaagtggtaataatttgttccagattgtttccaaagatttcttaggttacgatccagagagtacatcagaggtaagtagttctagtggagtttcttctggtagccaatttgggcagaacatgacattcttctcatatccgagagctaggacatttacatttggtgttaatgtaacattttaattaatctcattaaattagacattaaaaaatgaaaaaaatatcaacaattgcggttgcctgtgccgggttattgagctttacggcttgtaacaactttttggacgaagagcctaagtcaacattgactgatgtcgcatactataagacacaatctcaaatggaatctaatgtaaactatttgtatcgtacgggtgcgatcggtagttatgtggatttcggtagtgcttatatcgggcctttcgcttctattcaagaagaattgacaggatatttctctaattcttatgaaggacaggaaatagtttgccgttataccagagaattgacccgtcaacaaaacacgatgcagttagcatctaagatggacaaggtttgggatgactgctatcgcggaattaacgtggcaaatggagcgattaagcatatgccagaggtacctatggatcaggctactgcagatcgcttgacggctgaggctaagtttttccgtgctttcaactatttttacttagtaaagactttcggagcggttccattctatacagatccctatgagctggctgagaacatggagcttccccgtacggaaacctcaaccatctataaccaaatcgaaagcgatttgaaggatgctatgaatgtattgccagaggctactttcgccgctaatggtcatcgtatcacgaagtatgtggccgctatgacgctgactgatgtttatatgtatcagcataaatatgcagaggctgctgaaactgtgcgtattgtcgttaattcaaatcataaattaacaacaaatgatgatttggcgatgaatagcgcatttaacaaattgcgttctacagatgacttggatgaggctatctatgcctatgagtatgataatcagattagtccgagtaactggttacctacttatgcttttgatggtgacgcttctagtaacggtttgtttggaacatatgccatcacccagaaagtacatggaccgaatgaccgttatctgaatatttatgaatcaaacgatttacgtcgtcaaccgaatcagttctaccactggacttatacaaatccaaaaactggaaaggtttggaattctgtaggtaacgctgcttgttgttggtattattacgatgaggatgccttacttactacaggtcgtggcacaaaagactggaacgtatatcgttatgctgaagctttattggacgctgcagagtcaatcgctcaatcaactggagtgactgctgaagcggccggctatttggctcaagtgaaggctcgtgcgaatatggaaggtaaaaccgctgcggagattgcatcatctttacaaagtatgggtaaacaagccttcatcgaagagtgttggactgagcgtctacgtgagttgcctttggaatttaagatgtgggatatgtgtgtacgtacaggcatgttcccgaatatttccgagacaaccccgggacaagtaacctacattccgttagtgggtgctaagaacgcatctggagcaacaatcaaagaatccgacctattatggccgttatccgtgaacgagatccagcgtaacccgagtctgactcagaatgagggatattctgcaaagtaatattttttattttaataactgatggttttaaaggggaggatgagtttttcattctcctctttttcattgtcctctcttttcgatttgtctggcgattatcaatttatcattttgtaaatgaaagtccttgaggattgcttttttagaactgaggcacgtatcatctacgaaaaacaagaaaaaatattcgcaatctgctgtattataacatattgttaaaaaagcaccttttattctagcgagatttattcattctaattcatatttacagggtaaaagacccgttttcatttgaatacgacacccatttcttcccaatctatcacttcatactaccgctcttatcacttaacgccaccgtatacgttggccaacggcacagtttgcatcggttaatactacttattgtatcggaaaatgatggttttttgaagaaaataaggtcctgaatgtcttttttttcctaaagtttaggctggttgagtctttttaaaaaagagggctgtcagagaaatgcttctttttaacatgaattgtcaaggttttcggtattttacttactattcatataccttaacaagcagagaaaacataataattgtacactaatatgaatgtggcaatgaataaaaaggagagaatgaaaaactcatcctcccctttaaaaccatcagttattaaaataaaaaatattacttcgcagaatatccctcattctgagttaaattcgggttacgctgtatttcatttacagggatcggccagtataggtctgtctccttgaacttagcaccactaccattcgtagcaccgatcaaatcaacaaattgaacctcacccttgtttgtagcggagatttgagggaatttacctgtacgaacacagtcatcccaaatcttcatttccaatgggaactcacgtaaacgctctttccagcactcttcaataaaagcttgcttgcctaatctttgaagctcggaagcgattgtagaaacatccttaccttccatgttagcacgtgccttaacttgtgccaaatagccggcagcctcagcgtttacaccactagactgagcgatagcttcagcggcagataataatgtttcagcataacgatagaagttccagtctttcgtacccttaccagtctctaagatagcagtttcatcgtaccagtaccagttacaaagcatcttcatatccaaagttgttccatcaaccggatgtgtatatgtacgatggaagaactgattcatctgggcacgcaagtctttctcaccatacacatttaaataacgctcgctaacaccatacacatttacccacaaagagtacttgtttccagtagaagagttggcgaagaatgtcggagaaatcaaattgaatgcgtgaacagggatattaccgttaggagaaatagccgcatcatattcacgggcataaataacctctggcagatcatctgttgtacgtaacttattgaacgcactaccttccgcaaggttatcgttagtagccaaagcgaattttccgctattgattacatctttcaatggagtaaccgcattagcgtactcgcctagtcgcatgtaaacatcagccagcaacatatcagccgcatattttgtcacacggtgactatttcccgcgaaagtagcatcaggcaaattctctacagcaaactgtaaatcaggaataataacagttttgtaaacctccgacgcagctgtacgagccggatattcaaccaaagtagcatcttctgttggctctgtaatcattggaacatcaccaaacatcttcacaagatagaaatagtttagcgcacggaagaaacgagcctctgctttatactgagcttgtccgtccatctctacgccatccacatatttaataactgcgttagctacattgatcgacttataacaacctttccatgtgtcattagtcaaataattacaacaagattgcgtaaagttctgacgagtcaactggcgagcataagaacagtctacttcctggccttcatactcattcacaaaataaccagttaccatgttcattactgacaagctagaacctctataagcgcctgtcatattacccatcttatcgggagcaccgtcacgatatagataattgacattgccaataatatcagcacttgtcttataataggtatccagcgtcaaggatgactttggttcctcatccaaaaaactgtcacatgcggtaaatcctaccaatcccgcacataaaatagccgttgttaatatttttttcatcgcaattttctgaataattaattaattaaaatgttacatttacacccaacgtaaacgttctagctctcggataagagaagaaggccatattctgaccaaattgctctggagataccgcaccattagatgtagagatctgggatgtactttcaggatcgtatccattaaagtctttcgccgtgatcaagaatgcgttgttcacattcaaatataggcgtaagctactaaacggagtctttgccaattgatttgagtcgaaagtataacctaactggattaagttcgcacgtaaataagaaccattagccacccattgagagtctgtcaatgtatcctgtcctgcgtgaccaccgttgaacaaccagatagcttgctgcatagaattaggattcgttccattatatgcgtcatacaagatatttgtcaaaccgttagtttgtccgaaacggtcatacgtagagtgatagaactgttgcaaggtctgaacaccagcgacaaattgtagatccaatgtgaaatcccaattcttgtaacgtaatgtattgatcatagatccagtccaatcaggtacacctttacctatgatctcacgctcagaagaacgtttcgcacgaccgatctgtttcttctcacagttaccagcctcataatcctcgatcgtataaacgcctaaacgcttataaccatagaaactacctacactctcaccaacacgtaagatggaagcaccacttacccattcgttcttcaagatatcctcgtcattatcacctaatgataagatcttattcttattaaagttggcattgatagaggttgtccaagtgaagtctttcgtatcaatattgcgagtagacaacatcaaatccaaaccttggttacggatagaaccgatattcttataaactgtctcgaaacctgttgtatgaggaaccggggcatccaataacagatcagaagtcttcttgttgtaataagaagcatctaacgtgattctattattgaacaaacctaaatcaaaacctatatcgaattgagcggttttctcccatctcagatcagagtttggtaatctattcaaataagaataggaattacgtgttccattcaataataaggtttcgcttgtaactgttgccaaagatttgtaaacaccaatctcagagttaccggtcaaaccatagctagtatgcaacttcaagttgctgatcgtattttgatcagacataaagtcttcttgcgtgatgttccaagccaaacctgctgatgggaagaatgcgtatttattattcttaccaaacttagaagaaccgtcataacgaccagtaattgtagcggagtaacgatccttgaatgtataagcgaaacgtaagaaatatgagttcatagcccaacgttcccaataagtcttcggagcatcaggcttcgtacctgcgtccatattgaagtcctcaaagaaatcgctagtgaagttctctgtatacattctagaatagtcatatttacgctcctgccaagacaaaccggccatagcattgatacggtgctcaccaatcgtcttgttataagtcaagtaagtctcttcctgccaataaagagtatttgcgtgatatctttcagcacgtccatgttggtcatatgccaaattcaccaagtcacttggcatatatttgtgcaaagtcttaaagttagcgtcaacaccgaattgagtcttcaaatccaaaccttcgatgatatggaatgtcaaggctgcattaccgaatacttttgtattatagttcatattcttataagtcttcaagatatgaacagggttagacattgcctcaaagtccatcggcataccttctggagtattagtagaagtatactttccatcgtattgaaccggcatccaaggaaccatctcgatcatagtacgacgagcgtcctgtccaccgccatcctcaggagtagagttgccccaagtatgatttacagctaaattgaccgctgtagacaaccatgtcgtaggattggcgtcataagcgatcttcgcattcaaacgttttgaataggtattcagcatgatgccttggttatcagtatagttcaagaatgcacccatagatgatttctcgccaccttgctgaacattcaattgatggttatgagagatcgctgtacgagttgcctcatcttgccaatctgtatcataaagaggattaccgttagaatcgaagaaacgacgatctgtaaaccaatccgcacgattagtagaccagttaaatggattgccatccttatcagatccccatctattctcattctcaataccttgcataaaagcatcgcaccactcctgcgcattcatcgtatccatcttacgagcgcgatgagccaagcttacagaaccagagtagctaaccttcgttccgccttctttgttaccacgtttcgtagtaaccatgataacaccattggcaccacgagcaccatagatagcggtagcggaagcatctttcaatacctccatagactcgatgtcattcgggttcatcaaatagaagttctccattactacgccgtccacaacatacaacggatcagaagaggcattaattgtcgcttgaccacggataacaacacggctaccataagcacccggctggctagagttagagaagatatttacaccggcagccttaccacgcaagttatccaatgcactaaagttttgagcttttaacatctcttctcctttagctgtagaaatagaacctgttacatccgatttacgcatcgtaccgtaacctactactactacctcatccaaagtctgtgtatcttctttcaatgtaacattgattgcagattggttgcctacagggatctcttgagataaataaccaatataggaaatcaccaaaactccgtcggcgggcacaccctcgatcgtataatttccatcgaaatcagtgatcgtaccgtttgtagtgcctttcaccaccacgttagcgccaataacaggctcacctgtaccgtcaacaaccacacctgttactttcttgccttgctgcactgccattacttcatcaaccgtgcctgcgggagcgggagcggccatagcggcgtttacagagaaggcagaaagcagcaaacagaacgctgaggctttagctatcccctgaatggataatagcttagattcattctttgtcattttgctttgttttttaattaagtttagattgattacattgtctatgtaatttttatcgttatagatggacatagttcgtacggaacaatatatttttagtacatttaggggctgatattcttggtttcaaggggtgatttgtgataaatgtgtcatttttattaaaaaaatactatagatttaagtctagtttacaaaaaaagttatacatttgcccagtttttaatgatatagaccatgaatggcgcactagttccgtacggacttacaatagtatcatcgtctttctatcacataaataattaactatcaaatattagcagtaaaaacactttaaattggttacaacaaacaaatgttaaatttattgagattcaaggctaggcgaaaatgacactagtatggcttctatgaaaaaaaacagataatgtattcagagactggataatatgaaaaaatttagccctcctttataaataaaagaaaaaccacattatctacaatatttctaccaagaaagcgccatagacttattcccacaaggcttgaaatccaataaggcattacccgaaacagagtctctcatgacactcttcacccatcactctaacacaaacaagtcttctgcttagaataataccgatttatttgggattaaatcctatcaaaacattcaatatacaaacataagacaaactggataagggcgggcaaaccccgcccctaccatgctaccaagataattttataaacttattctcccacggagcgaaactcaacggattccccgaaactgggtctcctacgacatcacaaaccgtagttttcacaaaattaattttatctgaagttacggagaaagtagctggcttcccgcctatctcacgcaattgaagcataacagcattctcgccttccacaggcctcatgtttaccaacaacaaattctccggtacgatcttgaaaatggaagccgattggagaggctccacctttttatctccggcaggcaaaacacgggtcaagaacggaatccggttttcccaagcgaacttagtcgcatactcaatagagttgtctttcgaagagttgatgaagtaactccattgcatctctcccatttggtccgcattgaaattggttacccagtagttgttcatcggccatgaatacatattcgtggactgaggtacggctccggctttataccgccccgtattgatcgccccaaattgcattaatggtatttcttggctacccatcacgacctgtgactctccattacgagccgtagcgaagttttgcaccgtgtaccaatcgttagaggagcccgggatttggtctacacccgcctcaatcgatccgccgggtacatctaaatggatctttcctccttcaacctcaaacgggaaagcgatataaaccgcttccggatctgttaccgcttttttgcgcaggcgataaactacctcgattttctttgttacgttaaatacacggaattccaccatcaaattattcggctcacgtcccgctaccgtctctccccggaaacgataggtatcccagacatcgcctttctcatatttctcgaaacgcatcttctctgggcgacggcggaggaattggggagcacgatattgttccatcggatgacggctatcgataatctcataaataaactcgcccatctcccattccgcatccggcgtaaccaattgtttgttcaaatccttatcatcctcaaatccgcaactacgcgcctaatatgatacagaagcgaaaagaatctgcatcgttagtaaaaagggggcacagtgcatcgaatgtcaccataaagacatataaatgccccttaccccaccatgcgacttgaggcaatacgcaaaatcacgactataagttgtcggtgttatccaaagtcattctggaacacattggcataagcattgttgcatgaatagatattcagcacatacttccttgatgtcctgacccatttggctggcacagagatgaacttaaagacaaacgtcttgatgcggcttgttgctttgagtccgaacctcttcacgtcaagcctcgccatgatgaatttatagaagttgcgtatgagtgccataagcagaagaaacaccgtgttttctcccataaaggattttggaagcctgttccagccgaatccgttattcatatcatcgaagatgcgttccttccctccacggaggttatagaattcgacaatctctttctcggaagactcgtagtcatttgtaaggatgcagcggtaggtgtattctccttcccacaggtcgagttcgccgtctatccgcttctgtctttgaatcacaagacggtatgccttccctttccatttctcgatgagaatggaggccagctcaaactcaatgccgcccaattccactttcttccaacctctgagggcaaagatgtcattgtagagcgaactgcatcggttagcacggatatagaaggtcttgcagtgtttagcaatctcttccactatctcttcagaacacgagccgcaatcagctctgaaacggttgataataagcttgttttgttcaaacctttcaaagaacctcttcagcgtgtccttctggtggaaacggacatttgtgttgccgtcgctgttctcaatgccgacaatcaagttgccaataaccgccacgccagggcgataaccaaggaacttcttgtatgtaggcttcgcatcaaacttctcagcctctatgaactggtggtcgaagtcaacgtcatacccctcgccctctttcagctgccctgtggacaataggcaattgaggagcagtgtattcagcttgtctgccgtgttgaagtcgtaggtcttgccagtgtcggatgtgtaggaaatgttatcctgggtcagttcctttatggctctaagaatcgtgtcggcactgcatgtgcgaagtgtcggatgaagcgaaaggtggtacatcagatgagtggtgacatcctcgatgcatgagccgccacaaaaataaacgctcataagcgaacggatgatttcgctgtattgataaccatacagcctgcatctcataccgagggttgagtcgattacagatgagagtctggagtcaaattgctccattattgaaaatattcctccaaaaggagtgagtttctcggatttaattgctacctttgccatgtctgtcgggtttgatacatattttgatttgcaacactaagataggtgaaaaatctgacatggcaaattcctgagcaactttttgttgctcaggtacttaaaaagttatatttgtaatagtgttgcggaattaaggatcatataatttacgaatcgtacctttacgggtattgaagtcgatggcataccaaggattctccacatgtgtctcttttaattccgtagcgccctgtatttccggacgtggcgcatcctttacctttatataatactgcgcatatcccaaagccgggacatctttcacgtaaaagttccaataagtaccatcggaacggctttcgccagcttgtgcgggaattacgttgccagccgcatccacgatctcgaaagccttgtctttcggaagaatctgatgatcgacataagctttagcgataccgctataactccagttgagcgtattgaatacagcgatagacggaacgtcgcttttgggcacgaacgattgtaatatacccatagtggcctctcccagcaaaccggaatggcgataggcttcccacgcatacgattgtttcaaggagcgttgttcccaagtttccagtccataagcgttacgcacgctctcactatgcccgaaagtatgctcatcatagaacaaaagagctttgttgatatcataaatccgatcattgatgtctgtcggcaattgagcgcctagtattttggcgaatgacaatccggcttggttcgcgataatatccgagtgagtcacacgagatatggcagcttcgcgagcaccggaagcgaaaccatccgtccaccaatccggccaagctccacgaacggtctcaatacgatccgcgtattggctctctaccgtcttaaagaattcgctggctaccgccgtgcgtaatttcggccattcatatttctcattccatttttgtagcatctcacaacttttcgtggatggaggcgcattatccgtaaaataacccgaatgctgggcggccaatatatcatacggatagtttttcgcttccatttgatccagatacgctaagacccgttcctcgaactgctcaaaatcatcggtatggataccaaagaaatttccttggttataatgctcggcacgataggtcaagaccttcttcccggatggagattcccaccagaatacggtaggtttatcaaaacagatcaacgcccggtggccatgggttcccatattcacatatttcacgccggcatccgcaaaatactcgctgaagcaccaaccgattccattcacgtcgtcttgcatagctacctcggcacgcatcccattctcacggaattgcttgatcggataaagggaggcggcgagcgtttgctcatcgggtaattcgtcaaagttcaagtacatcgtagctaattcgatacgaccctcttttacccgctgcttcaggcgagcgatctgttccgccggacggcatttcaaatattcgctaaccgcccaagcgatctcgcaagtccaacggaatttagcgaaatccggataattatccgtagcatcacaataatccaacgcataatcaatatatcgtagatgttccgctaagatttccatttgggaacgagtataaccgatatccgtatgcgtgtgctgcaccatattcatttgccaatggcgaaccggttttaccgtcaccatagtctcctctttctctttcccacttgtcagcgtcaacggtaattggcgagtcgtgctaacctcgggtatctcgattcggaacacattatccccggacaccagtttctctttacggctttgctcgcctaaacggatcgttactgtagaaggctctccttcatgtttcacggagatctcgaccttttgggtcagtccgtttttcgatttataaaccgccggcaatacacggctcttgacatccgataatcccggagacgcatggaccgacaatgtcccaatcaacaaagccaatcctgctgataaataagttctttttttcattttatcgtgtttttatggatataagtcctatatacaacatacatattaataatagcatcaagccggctacctgcccgaacatatcggctaagcctcccatacaaggcgtaatcaaggcgcctcccgatacccccataatcatcaaggccgatacctcgttggattgctccggacgatgttccaacgcgaaagagaacaggatcgaaaacacattcgagcaagccaagccaaccagtacgatcataacgcccatgctccacaagctatccgagataagcaatcccacgaaagcaaggataacgatcagcatgcttccccttaagaaaggtcgtgacgagatcctcgccaacaatatagcccccaggaaagagcctcccgtacgagcggcgaaataaaggctactccctaatccggcctcttgcaacggcatggataacttttccatcaatagcttggggatcgtcgtattcagaccgacatcgatcccgacaatacacagaatccccaagaaaagcatccgtatcctagcatctttacataaagctaatgtagaggcgaacgaggcttcttgctcctctccttcctctttacccggaatagccgttatcaaccaaatgatagacaacaaggtagtcaccgaatagacaatgaatatcaacttccaatccccccaaaaagaggaagcgacccccgcaataatcggacctaagaaggaagataccgccttaataaactgccctaacgtaagcacgctcgttaccttatccggatttaccacccgggctaccatcgggttcaaagatacttgcaaaatcgtatttccaattcccagcaaagcgaacgcaaacaagatacaagcaaagtcatagaagaaaagaggtatcagcatcgccaaggtcgtgatggccaaggcagcgactaccgtattcctacgcccgtgccgtcccatccagataccggtggggacagagaacagggcgaaccaaagaaagaccatcatgggtaataggttcgccaaggtgtcggacaaaccaaaatccatcttcacataattcgtggcaattcccacgacatccacgaatcccatcacaaaaaagccgaaaaggatcgggaatatagcagagttcgtacttttagttctcatatccatcttttggttggctacccatttctaaaaccaaatgtccaccttgaataatctccgagaaaggaatacgagtatccgtcaatggtttcccgtttaagttcatcgattgcacgtaatcattttgcttactattattacgggcctcaatcacgaattccttccctttataatagcggtcattcagccggatcgtaatcttatcgaataaaggactgcccaaagcgaaagaaggcgcttgatccgtcaagcctttcatatcgaataagcctaaggaagagatcacgtaccaagccccaagctggccttgatcctcatcttgtccgtagccataaccgtggatgccatccgtaccatagaactcattcaagatcgcccgtacccatttttgcgtaagcgagggacgaccggcctcgttgaacatccaagggatgtgcaagcacggttggtttccttggttatacaaggtttgcaaaccggcgaaagcccctacttccgtgcctccgctaaagattaatttacgagacaccgtgaagatgctatccaaccgatggttaaacacgtctgcgcctactttcgcgaccaagcctttcgcgtcgtgcggtacatagaatgtatattgccaagcgttaccttcttggaatccgcgccatacttgcatcggattgaagtcctcgataaacgtaccatccttctttttaggacggacaaaattacaggaagggtcatagatacgctcccagcctttcgataagtccatcaaacggttataatcgtccgtcttacccagttgcttcgcccattgggccacggcccatgcgctataagcatattccaaggtatgggaagcggagaacatgaaagcctcgtccggcccgtcccccttatccaaatgaggcacataaccatattccacgaaataacgggtatcgatctttcctgcgcccaatggacgattctccccatccaactcattcttcaagcaagcctcataggccgtattcacatcgaaatcccgaatgccacattgataagcgccagcgataatcgtacttaataaattcgtaccaaccccggagacataacggctattagcgattccatccgccagccagccggcgtccttgtacaccaacaaatggctacttatataatccgaataatattccggataggccaaagcccaaacctgcgtcagattccattgcgttccccaagcggcatcggtattatataagttatgtatcggtttcccgtctttcaaagggatttgtcctaccgagccatcatttctcggataagcgccattcacgtcgctagccaatccgcggcccaataaagcatgatacaaaccggtatagaatttcaccttatcctcttgcgccggagtctctacccggatacgtcccaaatattcttcccatgtttggcgagagatttcccttgcttcgtcaaacgtaagggtagcggcctccgtctccctatttaaccgggcattctccacggatgtataggaaagacctactttagcggttaccgactcttgatcttgggtacggaatgtcaaataaagtccggctcccacacccgtcgcttttcgttcatccggacggatatccgccccgttgaaagcgccatatccaacgggagccttatccagcaccgccgagaaatacaaaggaaccgatgccccgggctggtatttcctcacatattcaggctcggtaatcacccagccctcgatacgcccgtcttccgtaaaagtaatttccgcgtcccgcacggctccgctttctccttggcggtttcctatatcgaacaagatacggctatcctccccggccggaaacgtataacgctggatagcgacacgaggggtagcggtaagctccgcccggatcgagtaatcttttaggagaacggaataataaccggcggtagcgatctcgtccgcacgatcaaaacgggaacggtatcctatacctgtcgagtcgtctaccgccccgggaattgttttcaatgaacccgtcgtaggcatcaagacgattccaccgatctgaaactcatgcaagcaggggaaaccctcgatcgattgatcccgataatcgtaaccggtagcctcccaaccggatttattcccgatatgcccgttcgtagaaggggccggcttggccataccgaaaggcatcgctcccggggtaaaatgaaaccaacggcaatgcgccgtgccgatccgaggctctacatattggctaagctcctcttgctggaccttcttgccttgtgtcacgcaggatgtgaaaaccccgcacaggaacaagaggaaacagaccggcttcatactatactttctcataatttatttagatagatggtttaacgcaaaaacataagcacccatagcgatcgagcggttggctccttgcttgctgaaggtcacccctatccgtttacaaggatcgtatcctaccttgcgattcgtacccgggactagcacctcgacagcctctccccgggcaaaaccggcgaagctcttctcgtcgtccaagtcatacacctccttttgcaagcgcccgaaacgagcaccgtccatcattcccgtctgcgcgttcatctctttcaacaagaccggcaggatgtacttggaagcaccggacaaaccaccgcctatcacgataagcccatcgatcaaggtaatagcggaagccaacgcgtccccagccatctcacccaactcctcaaacgcggcgatagccgcttcccggttacccggacgaataccctcggcgatctcgaagatctctttcggggtacgcgcccccgcatcaccgctccgctccgcatagacacgcatgaccgcccgtatgctgacgctctcctccacgatatactccgggtacttcttgttccgcaggcaccatacatatcctcccgccgcgttatcaccccgcaaaagctctccatcgatgacaaccccggcaccaaagcctgtccctagcgtgacacctagcaaattcttatatcgtttcgtacttcccgcctcccgcaaacggcggttgatctccgggagcactcccgtcaacgcctctccgtacgcaaacaagcttccgtcgttattgataaataccggtatcccgaatatatcttccagaaacgggcctaacgctacgccaccccggaaagaggggaagttgggtaaatcgcctatgataccggcttgataatccgccggaccaggaaaagcgaaactgatagcgaccggagcttccggcaagcctgcttgaattgccttaaaaccctctaccaaattacctaaacacttatccaagcaatccgcgcatgccggaagaactaccggatcggctatctcttttccaccttggatggcagagaagacaaaattcgttcctcccgcatccaatgtcattactattctattgtcatttgtgtacatcatatattccttttctttacttaaagaggtcccgccagtgccacagcagtggcactactttgccattagaggtgacacaaccttgccttcgaagtggcacaatcgtgccatcagtagtggcaaagcagtgcaatgcctatggcaaacggtgattattgcctaaaacgtacgtaagcctttatagtaccacaatatttacctacagacgatccatacggacggatcgtatattcacccacgcaagccgggatgataaaagtctccgcgtaatgaacgatgaaaggttcgaatgcgcctgtcgggctctccacgatcaactcatctcccttgattacattcagtacttgcacccctccattcgtattgtgaggcacgatatccgtgaaccaatgacggcgggtctcgatgaactcgttctcatgcaagccggtccgctcctcccgccaaccgtctccctcggcgatcatctccacttggttgatcaagttatgacggacaaactccgtttgccgctcccattggatcactttcgagccgtggccgatattaataggtcgaggcagtccgtccaatcccaagcggccccagtcccaaagcttaaacgtaaagatacttggcgtagcgctaatctcaagcaccatggcaccggctcccgaacaatggaccgttccggcggggatcagataatgatcatggcgtttggcaggccatttattgacatatttctccgtatcgaaaggctttccggtctgttgggactcgtttagggcagcgatcatctcgtccgggttgacaccggttttcaatcccagataaacggtagcgtcctcctcggcatccagcaggtagtagctctcgtcctgcgtataataaatcccgaacgtatcccggatatattgggtgaccggatgcacttgcaaacttaggtttcctcctcccatcgtatccaagaagtcgaaacggatcgggaaatcttgtccgaaacgagcctcgaccggcccgcccagcaagtctctcgtcttatagaataccaagtcattggaagggatctcaaacagctctccggcaactttcaggtataaactattttcctcgggcacgcaatcaaaacaccagccgaagttatcttgctttttatccagatcacagacctctttcatccattggccgccccaaggagccggatcaaagaaaggtactacccggaacggagtatgcgccgttttctccaacccttctttcaaggtctccccggaaatcatcttaggtgttcggacgatatgggtatccaaccaataatcgaccttaggaaggactttcttcttcagattatcgcaaacaatccaatcaataaaatatcctcgcttataatggtacgacggggcttcctcccggttttccacacctagcccgttcacctcttttctacgggaacgcatctggatctcccaacgagccatatccgcatagatcaatttgtccggagcggaaacgatctcggcggcggcgtggccataaacgattgtccagccttttccatcacgcaaggactcccggcaggcgttcaccttctcctcatccaagaaatccgtataagagaaatgagcccggcggccaaacaaccggtcatccgtcagataaggataggtcatcgcctctatatcttctgccgatttaaataaatctcgcgtattgataaaacgatcgggcgcgagcgcttgcagttcacgcatcaactcctcgtgatgaaccccttggtagcattccaccacccaaacttgtgatccattcgtttccgcatgtatctccgccaatcgcttccgtatcgattcccagcctttccacaaggtaccgtctacaacggtggccggcattttatcataattactttttctcatctcttttgacatttaatattgcacgcttgtatttaactcttatttttctctgcccaatcccttaataattcaatcgccttagataacactccggccgatcccttgaaattaccagagccgctggggacaccgcctttgccataccattcgtagaatccgtcattttggatcacacgctcgatcatcggatggatctccgcataagcctcctcaaccattccattaacgacaagctgctggatcatccgaccgccaaaccatgtccaatccccgccattctgatacagataagccttagacattcctccatggaaaaaaccatccggatacacgggatataaggtcagaccaatgcttggcatacccgacaggcgaacattctcaagcatctgggcatttacggtacgtatctcgtctttcgataataagccggcctctatagcgatagccgtcccaccatgataatgaatggcaagttcatcaaaaccttccggaatcggagatttctccggataaatatgaggaatgaacttctggcgctttacatcccatagatgagcccgcacatttctctcgattccctcacgcagacttttccaacgggaggcttgcggagaatcaggagccatttccaacaaataatccaaggcgattatgaacatagcgttatcatatacatcgatagccggatccgacaaatcattcatatcacatccgaaatcgtcattcggctgtacatcgccccaatcagcggtcattgctccataaagcaatccatatttctcattatatcgttcccgcatcagataatctaccatcgcgttcattcgctcgagaacggtcttcccgacaactttctcattcaatatctcccgatcacccgtcttacgaatgtatttacctacgatctgaatcaaggaagattcttggtccgtctctaccgtattcttaaaagcgacatgtttcggagcggcattcgaataataaggcgtatcatcataccatgtaaaatcttctttcagcacataaccatcgatcatctcatcattcggctgttgaagagcgaaaaacaataaaatagcttcccgcagttcgtgtggatcactctcctcgcaagcgatctctataaacgtattcatatcacgagcccatatctgggaataaccgctacctgcgttaaaaccattgcggatggtagcacgagccatactatcgaccttcaacaaattcgtatcagacaatatctgattggccaatcgctgtctatcggttaatcccgtacaagacaaaaaagatacaaatacaaaagaaactacaactagaattttattcatggcattatgttatgatttatgtcggcaaaattatttcaataatccagaaagaaatgctacatttgttccgatttacttgtacaatcttatgatttatagatcatggtcaagataaaagaaggatttaagggagaacggctcgtttctttacccgaggaactattggcaagctaccggagggaaccgctcatcaataatttatatgtacgcaagataggtttcttcccacgtgttaaatatcattttctccaaaaagaacatggctgtgactacgccatgcttatttattgtacggagggaaaaggatggtatcgtatcctcggtaaacaatataccgtggagaaataccaatatatcatcatccctcccggtatcccctactcattcggggcagacgagggagatccatggactatttactggttacacttccaagggaagctttgcgatcaattcctgccgtcgcatccggttccggtcactatttcgccgaatgaatattcccgtttacaagatcggttacggctgtttgaggagatatatagcagtttctccatgggatatattaaagaatatatgatttattcctccatgtgcctttacaattttctggcctctttcatctatctggagcaattccgccatatcatgattccctcgcaaaaagaatatccgttcacggcacgggttattcattatatgcgtgagaacatccagcagaatcttaccttgaaggaattagcgtcttatttcaaatattccccttctcacttctctgctctcttctttggcgagaccggggtctcgcccatgaattacttcatacgcttgaaaatacagaaggcttgtgaatatatcgagctaacgaatatgaagttgaatgagatcgccacgcatctgggattcgaggatgccgcctacttctcgcgtacgtttacgaaagttatgggttgctctccttccgtttatcgtaaaaaggagatggagatatagaattcgtttggatttctagtatttctcataagaataaaatatatttgtacaatagatatttaaacgaacataaagtaagtagttactatgatagacctaacacagttcaccccttggactctctttacggatcttggattcatttcgatacttctattggttggcaaattcatacgagtcaaggtaaaactgatacaacaattattcataccccccagcttgatcgcgggcttgctaggactggcgttcggacctaatggactggggtggattccgctttccaatgacttaggtacttatgcggctatccttatcgccttggtgttcggcgcgttgcctttatcttccccgaacgtctccatgaaagaagtagcgaaacgagtcggaccgatgtgggcgtacgctcaggtgggtatgttattgcaatgggcattggtaggccttttcggattgtacgtgatcaaactgatctggccggacctgaatgacgctttcggcattatgttgccgacaggcttttatggcggacacggcacggccgctgctatcgggtctgcgttcgagggattgggctgggacgaggctcgcagtttaggcatgacaaccgctaccgtgggggttatttgctcgatcatcggaggtttactgatggtcaaatgggcggccaagcataaacaaaccgcttttatctcggatttcgacgatctaccggacgagctgagaagtgggttgctgccagaggataagcgggattccatcggagaagctacgacttcctccatatccatcgatacgctgactttccatgtggctttggtatttgtcgtggcttttttgggatatatggttagccaaaccgtaaaggtgtattatccggtattggagttacctgttttcagttgtgcctttatcattggattagtattaaagaaattcttcgacgcaacaaccatatccagatatatctgcccgcagacgacccagaggctgagcagttccttcacggatatgctggtagcttgcggtgtagcgtctatcaagctaggggtgatcgtaaaatatgccttgccgcttatcgtactcatcatagcgggcgtggcgatcgtctggtgcataacattcttcttaggaagaagattagccaagaccttttggttcgagcgcatgattttcgcttggggatggtggaccggcacgatggctatgggcatcgccttgctgcggatcgtcgatccgaaactttccagcaaagcgatggatgattacgcaatggcttacctgcctatcgctcccatagagatcttattgatcaccttcgtccccatccttttcgtaaacggattgggagtttggttgctattagcctgcttggtcctttccctactgatcttgctactggcgtggaagatgggatggtggattactcgctcttgatactatttaccgggttctcgttcgccgctttccagttctggaaactcacggtcaataacgtgattacggttacgatcaataaagcgattaagaatacccacccatggatcggagtcttgtaggcgaaaccctcgagccacatcctcacgccctgccaagcgatcggcgccgctatcacgaagcaaatacctacaatcctcagataggccttattaaacatcagcaggatctcccctaccgtagctccatgtaccttgcggatacctatttccttacggcggtattgagtctcgaacaccactaagccaaataccccgaccaaagagataataatcgccagcagactgaagaccgtaaccaagctgcgtaagttctcttccttccggtagagatgattaaagatctcatcatagaactcgatattgaacggatagaaagggtctaattctctcatcgtctcctgaatgtgacctactacggcatgaatgtccgatccggctttcaagcggatataagagattggcaaagaataaccaaagtttccgaccaagaaagcgatattatcctctccaccacgaagcgaggtgaatttcacatcgtcggagaaaccgacaagatgaccggaagaatagctatcgaacgcgtcacccacttgcatatccaacccctccatcgccgtacgattgaatatataagacacatgatccgaaagctcgtccgcctttgagaaatctctcccttctataaccggaatccccatcacccgcaagaaattggaagatgctataattatgaaatactgaaagtccttacccttataattaccgccattcgtgttatacccgtccttagagcccactttctccatagcgaaagccacatcctcgatccccggattctctttcaagcgattcacatatgtatcgtgatgcttattgtacattgtctcattcagctccacgatagctacctgatccttatcgaatcctaaagagaaattcctcatataactattctggatttgcacaaagcaagccccaataatcaacacgatcgaaacaacgaactggacacaaatcaatgtcgtacgtaacttacgcccggaaggagataacccgaagctgcccttcagcaccaaggccggaggaaaagaagttatataataagcaggataaatacccgccagccaaccgataaccaacgctacgatgccacacaagaaaacgatcggaagatttgagaccaaactcaaatcggcctcgataaaaggtaacgcttccgcccaatccaatccccaaacgataacgagacttaccagccacgccataaaactaataagggctgcctctatcaataaagatctgcgcaacaaagtatccgagctacccaataccttctgcgtattgatgcttttgattcgcaacggagtcaaagaagtgctaaagttcgtgaagttaatagccgcgacaatgacgatcagaagggctataccgaacaataaggccgtgacttccttgtttccgctccggaatgtaccaccgtcttgcgtctcattcatataataaatatcagtcagcgggacgagccggatctgttctccttcatggtaaatcttcttgaaatcaaaatgacggttgaaattatcggcaacctcatctgccatggcaggattatcaagcaataaataacaaacccagttacttgagctaaaattattgatattataatccggatcgatcgccgtatagaccacgttccgaagctgcgtgttctccgggaaatccttataaaccgcaccaatcgtaaagagcttagccgatttagtccagatattttcttccgctcgcaacgtcttaccaaccgcggagatgtcctccccaaacaacttgtcagccaagcttcggggtaccattactttctcaggatctttcaagcaatcgatatcgccttccacgatcgggaacgcgaatatcttcggtaaactagcgtggcaggttgtcacgatttccttaaacccaaacggttgcccgtttctatccaccgagagataaacaccattctggccaaaagaaggagtcaacaatgtacccgcctctatatgcggggaagattggatgacagcctccacaaaggcacggggtaatattgtcccgaaagtacccggaatggtcaagtccaccctaaaaatccgcccggacgtaggatggcaacgatcaaaagtccgctcaaaattaatctgtatcaaaatcacgataaaagcggcgaaagcaaccgcaagaccggctacgttcaatgcggtcgccattttaaaccgcctcaacacactcagaaagttccgaataatcgttttcatcttattattatagtttcatttattattccgtcttaatgctatccaccgggttcgcgttcgccgcacgccagttctggaaagttaccgtaaacatcgttattaaggagactattaatagagcgaacgcaaatatccaccaataaataggagttttataagcgaaaccctctaaccatttccgtacgccataataagccaagggagccgctatgataaagcaaacgcagacaatacggaaataaatcttattgaacataaccaagatctcatgaaccgtggccccgaataccttacgaatgccgatctctttccggcgatactgggtctcgaatataacgaggccgaatataccgacaatagagataatcacagccaacaggctaaacaataaaatcatcgtacttaaattccgttcctgatgatataaatgatcgaaaatctcatcataaaattccacctcacaaggataggtagggtccaagcgagccaccgtctggcggatatgatccaccacacccacgatatcgcttcccgccttcacccggataaacgaatacagcatcaagctgggttcattgataacaaaacctaactcggagacgccctgtcgcaaggaggtgaatttgacatcatccacaaacccgatcaaggaaccatcggccgattcctcctcaagccatggaatccgcatgatatcattcggctccatgctccatttatcccgcatttgtttattgaatacatagctatagctgttgcctttctcatcagactcggtaggcatccgccccccgatcaagggaatacccattaccttgaagaaattccaagagacagcgagagacgtaaaaccgacactctgttccttatagatgccagaccacgtacggtaactatcctccgacccgaacttctggcgacaaaacgccacatcctctatccccggatattctttcaatccgcccacgtaactatccttatggttacgcataatattcccattcaactcgacaaccactacctgatccttgtcgaagcctaaagagtacttttgcatgaacctattttgctgacgaacgaacatggctgatataatcaacacgatagagaccacaaactgaaaaccgatcaatgccgtacgcaacttcttccccgaggaagaaagcccgaaggagcctttcaaaaccactgccggaggaaaagatgtcatatacaaagatggatagatccccgcgataagacctattataacagacaatgctgccaagcctcccaccaaaccgggataagcggacagtgccgtatccgcttgcacgaaatacaaccatcccatatgtcctaatccccaaacgataaacaaagaacaaaggaaagcaagcaagctaatgcccacggcctcaaataacagggaagcacgtaatatgccggcagaactccccagcactttttgcgtgttgatactcttgatgcgcaaaggcgccaaagaggtactaaaattcgtgaagttgatacccgccacgataatcaccagaaaagcgatcagcatcagtagccgggttttctccgcactaccgcttttcactaaacttccgctggaatcctcgttcatataataaatatcggttagggggaccagctcggcatgtatatctttcgccatatccccatattgcttcgaatagtcaaaatgggcatcaaagttcccagccacttctttcggggaagcagaaggatctagcatcacgtaacagaaatagttactacttatccaattcgtcagtgcgtaatccggagacatctctgtataaatcacgtttttcaactgtgtgttttccgggaaatccttataaacacctcctacgaccaaatatttcacacccggttttgtccagatcccaccatcggaaacgatctgctttccaattgccgattcctttccaaataaccggtgagccatactttccggtatcaaggctttttccggttccgacaagcaagaagattctccttcacgcatcgtaaactggaacatccgggtaatctccggatggcaagttatgatcgtctccttgaaaccttgctttccctcttttcttgtaacagtcacatacatctctcctatatacggattaattaacgtaccggcctcaatatgcggggaagagtggataaacgactctatcaacgggcggcaatggatcatgctcgctccatccgggaaagaaagccccatccgataaatccgggtcgagttcggatgacaacgatcgaagttatgctcaaagcttacttgcatcatgataattaaaaacgcggcgaaagcgaccgctaatcccgctacattcaaaaaggtagctaccttgaaacgtattaatacattgatgaaattgcgtatgattgttttcataacttactctattttattgatactaaaatcgacccaaaaagagtattccttaaataagatggctgatattcattcgtttcaagatattcaaagaaaccttgttcaacgcaattgtctcaacctcttccgtacggaaaaacttacttaaaccttcgatcttaatcatggctgtatttgttttaatttattatactcaaatccatctaataatattcaaataacgtgccaaactacatatcaaactaatattcaataaattaattctcaattcataaaacagaagtgtccaataattggacaccattgtacaattattggacacatacttttctatgaaaacagcaatatgattctacaaaaatcttctattcattcttaatactatgtactggattctcattcgccgcacgccagttctggaaagtgacagtcaatatcgtgataaccgctatgatagcaaaagcgatcaaatacacccaccaatacataggagtcttataagcgaaattctcaagccatcgatgtaccacataaccggcgataggcgcccccaaaacaaaacaaacacataagattcttatgtatgtcttgttaaacatcacgataatctcctcggtagtagagcctaataccttacggataccgatctctttcttccggtactcactatcgaatacgaccaaaccgaatacccctaccaccgagataaagatcgcgattaaactaaataaggtaatcaatgaactgaggcttctctctttctcataaagtccgttcaatacctcatcgaagaaacggacattaaacgggtattccggatcaaatgattgaagcgtagtcttgacatgttgcatagccccccgtaagtcagagccggcttttacctttatataagcgtaattaggttggtttccccaattattagtaccccatacaaaaaaggccataggcgttacctccgtacggaaagaggcgaatttaacatccggcataaaaccgacaatctccatactatctattaaagatcctatctccagcccatattctgtccgggcacgttcgttaaagacaaacgtgccataacgtttcgccttatcttcctcccggaaatcacgaccttccgatattttcacattcatcaccttcaaaaaagaaggttcaaccggtagacattggaattgtatatccttatcccggtatttacgtccccatcccatgtattggtcctgactagaaaggagcatctccgcatatgtaacctcttcgataccggagaaagatttcacttggctggcgaaggcatcccgacttttccggatattgttattcatattcgtaataattatctcatccttatcataaccgagaggggtgttttgcatataataattctgcaaatacatgaatgtagcaccaataattaatccgaaagaagctacatactgcactcctatcaatgcatttcgtaattgacgtcccttcggagacaagccaaaactacctttcaacactaaagccggtgggaaagaagtcatataatatgctggatatataccggcaagaaacccggtagctattgagataaaagctgtagccaaaaccaatccgatatgcattgataacgaaatatcggcatttatcaatgaggctatttccgtcttccccgcaatataaactaatagcagtcctaacaaataagagattatacttattaacaccgcttctaaaatcaaagcaaaacggatcacagattcttttccccctaatactttttgtgtattaatactcttaatacgcatcggggtaagtgccgtactgaaattcgtgaaattaattccggcgattaccacgatcacgatagctatggcaaataatatcatcaaagtttgcctgctggctttcggggtctggtcatattttacatcagtcgtataatgaacatcaggcaacggattaatacggaaagtcattccagatcccccccatgagaagctattatcctttattagagcaggatcaaaatgtgccttgaaattttcaaataacccctcgacattcttcggattgtccaaacggatatagaaaatataattccagtttccccagctttgggcgttttccttcgggtccatcttttgataaatacaattccgtacagatgaattccgtggataatccttatacactccacctaccgttagatgatctccattctcaaacttcaattgcttgcctacagccgattgattcccaaaaaacttctgagccatgctctgcggcaacaaaacaacgtttggctcctgtaacgcctccggatttccttcctgaaatttaaagtcaaataccttcgtgaattcaggataaacatttatacattgttccttaaaagtattccgtacaccattctcttctacagagaaaaacaagtcccctccccaaggattcgccaaggtcccagctacgatatgaggcgaggattggataaaagcatcggccagcggacggcaaataactgcctgcccaccatcctcaaacatagcttctacccgaaatatagattccgtatccgtatatcctcggtcaaaattctgatcatactcgacttgcatcataatcaagatgaaagcagaaaaagccacagatagtcctaatacatttaaaagtgtcgccatcttgaaacggcgcaatacactcaagagattcctcaaaatagttttcatacgtaattttatattacctgttatattattcgttcttaatgctacggaccggattctcattggcgatattccaagatttcaggatcacgcatccccaaatgatcgctagaaccagtagagccgtagatatgaaaataaaaacagtcagcggtatcttatccgcgaattgcctcaaccagctctctcccacgactcgtgaggctatcactcctaaaaggatagccgggaaagccgtgaccaaaacgtccttagataaaagacgtaaaatattcggggccgtcgctccattcaccttgcgaatcgctatctccttgctcctacggtgcatctcgtccgtaatatatcctaataatcccattaaggtgatcagcaagatagcgatcgaggcaacaaagacaccgtcacggaaatgacgggttccctcatactgagactctataatcgttttcagcaccgtaaaaccgacatcctcatccgggaatagttccgcaatccgatcattcatttcccgcaaatattccggagttagctcggagacacgaaccgtaaagttacaataactcatccggtcactaccaaacatgatgaccggtaactggggagtgaagaaggaattcaccatgaaatcacgggttacacccactatttttccttttaaattaccctcatcatcataaatatatttaccgatcgcagcatccgtccacccacgtttactcacgaatgactcattcactaaaatatccccgtcaccttttagtggttgcccctcaagcaaggggattttcatcagagagagataatcggcatcatagtttacctgtcgggccgtgaacagccagtttttctcattatccagaatagggaaaccaccataaccacttagaatgtccattgacgaaagccccgtagccgtgacataaggtaacttcttgaactcggcggtaagtttggccgtttccggatcatccatattattcaagggggcatacactatattttccggatcatatcctaaatcattattcattagccgatcatattgcaataacacgatcaccaataatgtaatgacaaacgcaattcccccaaactggataaagagcaaactccgcttccatccctgcttacccgaagtagatacccggaatacttgggtaaccgggataacgctgaacaaacgggccggtagcaaggcggacaaaatgaatatagccaagatcatgatcgcaggaagccatatagtctgcgcattcaataaagtgcccaaagtaggaacagccgccatatccgctacatattcccggaaagcgaataaaagcaatgccatacatacaagagccactacaaataaagccgccgtctcaaacaagaacatattgaaaatgtccttgctggaagctccattacatttgtgtactcctacggatctcgcccggatcggcagagaagataccgagttcaagatataattcatcgccgccacgaataacaaagcgaaagccagtacgctcatgatcaccaccatccgcttcacctcggtactttgcgtatatatctccgagaccggcttgatataaagctccatatcaaaaccttgtttcctctctctttctacatctatatatttaggcaataaagccggtattttctgattgatttgttccgggaacacacccggtttcaggcggatatagcccagataactatcgtcggcaccccaaccggcataggcaccgaactgggttttcatattaatgaaagaagcgacagcgtcaaaacgtaaatgactattttccggtatgtcacggaatatcccggccaccgtataaggatagttttttccgtacagcagttgtttcccgatcggatcttccttgccaaatatacgttcagccattttttccgataagaaaacttgatcttcgattcccaacaaacgatcatcccctcttagcaccttgattcccatcgtacggaaaaagagggaatccgccatcatcaaacggggcttgaaccgatcctcaccatgatacaatacggctccgtatcttctccggcaaaccgtcgcatactgtatctcggggaactcttgccgcaaagcctccgggatcggggcaaataggatacgagacccatcttcctctcccgttttatcatcattgtatcgcacatgcacgctatacaaatcttccacttggtcaaagaatgtatcgaagctcaattcaaaagcgaccctagcgaacaggatcaatcccactccaagtcctagtgtcaaggacagaaccttgatcacatttccccctcggcctcgaagtaaataacggattgtataatatagctgtctcatcgatttgtatttaagttaaattgaaagctaaccgaccttcacaggccaattagcttataaaaaactcttgtgtgtatgtgtttatgtcatgttgactaaataaattcactaacggaagaaacaacgctaccgtcgaataaattgatcacacggtgggcgaaacccgcgtcgtgcttggagtgcgtcaccattacgattgtcgttccctccttattcagctcggtgagcagctgcataacctcggcaccgttcttggaatccaagttacccgttggctcatcggccaagattatcttcgggttggaaactaccgcacgagcgatcgccacacgctgctgctgacctccggagagttgctgagggaagtgagccgcacggtggctgatattcatccgcttcaagatatccgttaccatctgcttacgctccgacgccttgatctttagataagtcaacggcagctccacgttctcaaaaacgttcaactcgtctatcaagttgaagctctggaacacgaaaccgatgtttcccttacggacctgcgtacgctctttctctttcaagtgtcctacctcttggtcgcccaagtaataatttccctcggaaggattatccagcaaacccagaatattcaacaacgtagacttaccgcaaccggaaggtcccatgacagcgacgaactcgccatcttttacctccaaagaaaccttattcaacgcaattgtctcaacctcttccgtacggaaaaacttacttaaaccttcgatcttaatcatgactgtatttgttttaattgttatctaactatttaatttaccatatctaattcaaatagtgtgccaaactaactaaatatttaattctcaaacaagtagtattttactttccaaaacagactgtccaattatttgacagtggtgtacaaaatttagacactactatccaatatctcgacataaagaaacacctcccagcttcacagatgagaggtgctattgttgacttatctacatagtaaaacctacatgtcactacttgatcttatctctatatctttttcctccggcatgtcgaagttctcaatgactgtcaagagaagctcctcttcatcaacatttatagaataagaaactgtatttttacccttcgagaaacggataaaccaactaaccaccccatcgttctcattctcgatcacttgataagcctcttccttgtcccgctcaaaagcggatttaatttcttgttgtaatgcggcgtggccctccacgacgaaagaagagactatcttatatacctttttagttttcggatctttattcgttactacgcttttatcgatcgtcttatccgctttacatttctgcacgacagcctccaaattcttctgtgcccataactctgtactgaaatttcccaccaaaaggcataatgccacccaaaaacatttacttgctttcataacttcttttgtttattagttaatttactatttatccaattccaagatcttataaacctccttacgtacctgagtatccggaatattcctcagtagagtctcccgtttcttctcgaaccgcttattcatcctttccggcaaataagctatttcatccgcatttcttaagagctgatccgcattcttctccatcgcttccgccgctcgggatatgacctccaattcggggtgtatcttctttatatctgtcattacgacaccattgcgcacgatgtagcttccctcataagggttaaaagaagcattttgattcataaagaccgtattcaccaaaaacaacaaaagagaagccgccacgcaaactgcgattgcccatcctatttttcgtttataagaaatttccttagcgggtagcctcaattccggagtctcgctaaaatccaaggcaatgccactctcgaaatatccgaatacctcccgataacgttccagatgggcgggaatatccggacgggcgaaaaactcatacaacactcgctcctcctcgttcgaggtctgaccctcgaagaagcggtctaataaatcctctatagacttgtattcctctgttttcataacgtctgcattttaaagaattgctctctcacccgtttacgggcacgggaaagattcatacgtaccgcctcgggggtacttccggtcaacccggcgatttcctccacctcgaaaccatccacgtgtttcatgcgaagaatggtctgttgaagtcccggtagtttattgataagccgcattacatgctccaaactgtctttttgttccagctgggtataaggcgtggaagcatcgcagataaagaattgttcgcccgcctcaccttccgtgcgttcacggactttcatccggtttaggcaaaggtgcttggtgatttgtacggacaaggccattacattattataatagtccaactcgccacgcatataccacagcttcaaaaagacttcctgcatgacatcctcggcatcctccgggttatccagcagccttctcgcataaaggaatagtttctcccgcaaaggcaatatctcttttttaaactgttcttgttccattctatcttaatgacaatcgagaaaagaaaacgtaacatggctggaaaaaataaattcaaggtctttgtcattctagtattatagtcgtgccacccttatggcacgataatgccacggcgatggcacgatgatgccatagcgatggcacaacgatgccacgctagtggcacagccgtgccactataacggcactggcttggcactgtaagttattactaaatagccctatacatcacagatacggatacacttctccaaggaagcgatcttgtcttcttgggcggggacgaactcctgcccaacgaagcctttatagcctgtctccataagagccttgatgatagccggataataaagttcctgcgtctcgtcgatctcggcacggcccggacttccaccggtatgtacgtgcgagaaataaggatggtatttccggatattctcgatgatattcccctccatgatctgcatatgataaatatcatatagtaacttaaaattaggggaaccgatacggcgacaaagctccgcaccccaaaccgtatgatcgcacagataatccttatgaccaacactgttcaaaagctccatggtcaagacgaccttgtgtttctccgctaacgggataaggcgcttcaaccccttctcgcagttctcccagccttgcaagtccgttacgccattacgtctgccggagaagcaaatcaagtttgtcaatccagcgtccgccaccatcgggatcaccttctcataactggcgaccaactcgtcatgcaaggccggatcattgaaacctcgatctattccaagcccggccccttgcgccatcgccaccgtcaggccatgtttttgtacgatcggccaatctaccgggtccagcaactcaacggattcaatccctatatgcttgcagatctcacagaactcatccagcttataatcgccgaaacaccatttacttacggagtggcggacatttcctttcaagggttccttcacgtctgttttctttttcgcggcggctgccgcctcgatacctgtagtcgccaaagccacgcctccagctaaaaatgtcttgatagccgttcttcttgatatgttttccatgtattcgaatttgatagttaataggagacaaatataagaaaaatcggatataatatcctgaggcgttggtattacatccaaaaacactacttttgcatcggaagtcactctacatgaaaaacacatcatatacaaaacgatctatttatctgatcctattctttataataggatgcacttcatccctatacggaatggaaggcgcaggtgtgtatttcaaggcgagcctatgcggaaaaatctataagcatttttcctttcttgtagaagaggacatccgtccgagagatgactttaaggaagcggaatggttcctcaccaccgttgaggtaaactacaagtttaataaatatcttctggcaggaagcggatatatgtctctagcacgatacaaggcatccgacgagttacgaaaccgatattatctctacgctacggggacttattcggccggacgttttaccctctctgtccgggaacgttttcaaagtacctataaggttcacgccgaacatcccaagaattatctgcgttcgatgctgaccctctcctataagatccgcaagagtggtttctgtccttttgcctacaccgaggtcttcaatgatacgcgaaataagatgcggtccgataagatccgtttctccacaggaagtaattaccaactaaacccgaacaataacctccaactctattatcgctaccatatatttaatgtagacgatcccgtgaattaccgccatgcgatcggtatctgctatacccatcgtttttaataagaattttcgtaccttcgcgtcccgagtgcttgataaacctcgttaaaaacaagaagacatgcaaaaaacagttacagtacctttcatgctgctaggtatactttttaatatatgccttgtagcgtccaatcttttagagacaaaagtagtgcaagtaggcggtataacggctaccgcaggtttgatcgtattcccgatctcgtatatcatcaatgattgtatagcggaagtgtggggattcaagaaggcacggctaattatctggagtggcttcgcctctaatttcctagtgatcgctttcgcgcaattggcggtattattaccggccgcccctttctgggagggggaggaaggtttcaatttcgtcttcgggatggccccacgtatagcggtcgccagcttgatagcgtttttggccggttctttcctgaacgcctatgtgatgagcaaaatgaaaatcgcctccaacggaaagaatttctcgttacgagcgatcgtatctacccttatcggtgagagcgccgattccctgatctttttcccgatcgccttcgccggattgatcccggccggagaattgcttatcatgatcgggacgcaggcggtacttaaatccttgtacgaggttatcatccttcccgtcaccatccgtgtcgtaaagtacatcaagaaagtagacgggaatgatgtgtatgatcttggtacctcgtataatatcctaaaggttaaagacatttaggccgggaccaaacaatgaccggccttcatttgaatagatgcgaccaatcctccctttgctgcggcatataggacttcattcccaataattcagccgcccggcaattcacggaagcgtcatcaatcagcatagtctcctcggctaaaagattcgagtccttcagtacgtactcaaaaatatccgcgttcggcttcagcatatgcaattcgtaagagaggtaaatcttatggaagaaatcttgggcacaaagaccttgataagagaaataggtatcttcggaccatttccaatgaagctcgttcgtattgctcagaagcatcgtattatagcgttcacgaagctccaatagcagacgcaacttattttccgggacgtctcccaacatggcgatccatgccgtgtcgatttgttcgtccgtcaggggcttccccgataaggcacgaatatcatcgcgaaactgttccaccgaaatcgttcccaactctaatcgctcaaacaagtccttatgttgatagttattcgtgatctgctcccggatattctccacgcccagattctcgaaagcctcgatacaacggttgcgagtcaggttaataagcacaccgcccaagtctataatcaagttctttatgccttccatatcatttctttttataccagctacgacgtctgcgatgtcgtcttttctgttgataacgattgatccgcttgtaaacgacccagacaaacaacaagccgaaaacagcgaatatcaatataacaatccaagagttaagattgtcaccttttacccggctccacatttccagaaccacctccgtctcgttcccgaaatcacggatcatggcacaacgttccacgaccttccggtccggatattgagccgggtctatctggatacgcaccgctcccggtccgaagaaataacttacgtccgagaactcggtccgcgtcgtatcgatcttttccgccaatatttccggggtggccacggtgctgacatatccggtcacctccatattacggctgacgatgtccggacggcatagatagtccataaaataactggccgccttcacgttgcgagcgtatttagggatcgcccaaccatcgtaccagatattactaccctccaaaggaacctcataccccagatctacgcctacggcactcgcctcttccatggcccagaccgcgtcgccgctccaagtgaaattcagccacgcctttcctttcgtcatcatctccttaccgaaatcggcctcccaaccggcgatattcggtttcatcttcttcaagtattcctcggcgatagcgatcatttccggggagctatcgttcatcaattgctccaccgtgatcgtaccattcgccaattccctcgcatgggcgtatatgatagcggttccataagcgtcacgatagctatccttcatcaagatcttattcctgaaacgagggtcccaaaggcatttccacgacatgacctcgtccctcgagacatcggctttattatacaacaggccggcggttccccacatataaggaaccacgtagtcggtagtcttccggcccggctgactcaatttattcagttccgcttggatatagggagagacattgttgatataatccggtgtcttcccgaaattacggtcgatcggtagcaagagatttttccgcagcatgcgctcaaggatatactccgaagggcaaatcaagtcgaaatcctcatgcccccgttcgatcttggtcaacatgatctcgttgatatcaaagacctgatagataatccgaacctcctcgcccgtctgttccttataccatttcgggaaatccgtcaggacatcctcgtcgatataatctccccagttataaatcttcaagatcttacttctctcctcgtccgagcgcccgcaagaagtgaacagccccataagcaggacccaaacagacagaatcgatataaatttcttcattttcatttacgctcgcttcgctttctcagcacgtttatttataacaatcaacaatactaacacggttacgaagataatcgttgagaggggacgcaactccggggtcaatcctcctttccgggcatccgcatagataaaggtggaaagggtttccaagccctcattaccaatcgtaaatatggtcacggcaaaatcgtcgatagacagcgtgaaggcaaggataaagccactgatcatacccggacggatttccgggaagatcaccttccacaaggcctgaaacggagtcgcccccaaatccaacgccgcctcgtagatattctggttcatttgtttcaagcgaggcatgacgcttaataccacatatggcgtacagaacgtaatatgcgccagcacgaccgtcgtcaaaccttgagagatccctaagctgacaaacaacaggaacaaagaaataccggtgatgatatccggattcaacatcgggatgttattgacaaagctcacggcattgcgggccctcgccttcaaattaaagatcccgatagcggctacgctccccaacaaggtagataccgtagcggctatcatggcgatagcgaacgtattccaaagggcgctgaccaacgaatgttgtacgttgccggcaaaaagagagctatataatttcgtggagaacccggtccagttacccagcactttcgcctccgtgaacgagaagatcatgataatcaggatcggcgagtagagcaacaaaagcaaagcccacagatatcccttagctaaatatttcaccatcagataagccctccctcattcgccgaatcactgctctcattgctgaacaatcccgtgattccgattaataacaacatgataagagaaagcgccgccccgtagttccacataccgttattgatattctcctgtatggtcgtaccgaagagcttgatattgttcatcgtcaacaactcggcgatggcaaacgtagagatggtcggcataaacaccatcatgataccgctcatcactcccggcatcgatagtgggaatacggccttgataaatacctgcgacggattcgcccccaagtcttgcgccgcctctatcaagctgtgatccattttctggagcgtattataaatcgggtagatcataaagggcaagaagttgtacaccatgccaaagatcaaggccccctctcccagcgggaaattcaagaaatcgaacaaagccacggtagccaacgtacggatcaagatattgacccacatcggaaggataaacaaaacgaccatcgtacgggaagtattaaatcgggcttggctcaatatccaagcggccggatatcccagcagcagacaaagaatggtcgttatcaaagcgatcccaactgaatacacgaaggtgtttatcgcctcgggatggatcataaacttacggaaattggcgaaggtaaacatcccctcgtcattcgtaaaggcgtaatacacgatcaagaggagcggtatcacgacaaagatggccaagaacaggacataaggaatggtccagttccttcgtctcataaaaaatgcagaaaacgtattgatcacttccttccctttttaagcatgaataattcgaattttatccggggcgatcgttatgccgacatgatctccatcatcccatacatcgttggtatcgacaaagatgtcctcgtcccaatccgtaaacacggtcagatgataatggttgcctttgtagaggataaatttcacctctccggtcaggcgaccgtcttcctcgttatcctccaagatcacatctttaaaatcgatctccactttcacaggcgtatttggctctatatcggttacctccttgcattcgaacgtacagcctaggaattccacatgcgtagcgtcgataagctttccctcgaaggtattgcaaatacgctctttcttcattacatggatatcgaaaggcttgataagaagcccgacctcgctacccgcctcgaacgggtggtaatcctgtaccatgaactcgtatccgttcggggtttgcaccatcatctcataatgcacgcccttaaagatggaggaggttaccgtacccgtcaacatcgccgcctccgacggctcgaagatgtaaatatcctcggggcgcaacacgacatctaccggcatttgctccccgaatccctcatccacgcactcgaactcatgaccggcgaaagagacttgcctatccttgatcatcgtcccgttcaagatgttactctcaccgatgaaatcagcgacgaacgaattgaccggctcgttataaatatcgatcggggtaccgatttgctggatctttccctcgctcatgacaacgatcgtgtcgctcagcgtcagcgcttcctcttggtcgtgggtcacgtacacgaacgtaatgcctaaggacttatgcatctctttcaattccatttgcatgtccttgcgcatcttcaagtccaaggccgccaacggctcatccagcaataacacctccggctcattcacgatagcacgagcaatcgccacacgttgctgctggccaccggaaagggaatcgacatcccgatcctcatagtctgtcaaccctaccattttcaacgcctgtttcactttcttctcgatcgtggcggaaggaagtttcttcagcttcaggccaaaggcgatattattgtacacattcagatgtggaaataaagcatatttctggaataccgtatttacgggacgtttatgcggcggcgtctgcgtaatctccttcccggacatcgtgataacgccctcggaggccgtctggaagccggctatcaaacgcaacagggtagtctttccgcaaccggaaggccccaaaatggttacaaactcgcccttgcggacctgtaaatttacatcattcagcacggccttctcgccgaaatacttcgatacgtgctccacgctgataatgcgatccgattttcgtattgacattctcgcttgatctaattagaattaaacaatcatgaacaatgttcttatttatttttgcgcgaatgtacagattttaataaggccgggcactatcgtttttacaaaatctgaccttacaccgggtgagaagcgtcgcatttctccaagattcgaccgcgcacccggcgcgaggtcccgcatttctccaagattcgaccgcgcacccgatgcgggcgggatatttgggaaatattcaatccacgtatatccggtagctccccgatcccaatcggtacacagccttcccatccttcaatcccacgggcgtgatcccctcctgccctttctccatacgaacggacttctccgatttggcgggcagatataaggtagccgtcgtattagcgggaatggttgcctcgtatatatagcccttcttttggatttgccatccactctcgatacggccataggcggaatcgtaatgaccccggatgaacgagaaggttccgccgatacggggttgaaggatgatgtgcttataggcgggttgttcctcatcccgctggatacccaaggtataagctatcatccactcctcgatagcgccatacgaataatggttgaaagagttcatatccacagggccgaagccatttaccaacgtgtaggaattccaacgttcccaaatcgtggttgcgccttgcaggacagggtatagccatgaaggataggcggtttgctcaaataatttataggcgacatcgtcataaccattgtcggataataccaaattcaggtaaggcgtaccgataaagccagtggtaagcgtataattatgtttcttgatattctctaccagatgccggatcgccaagggtttgtttttctcattgaacagatcgaactggagaggaaccacgtatgaggtctgcgtatccacgatcttcgcctcggtagccgccgttccgggccacatacctacttgcgaatccttgccaaagatagattccaccgtcggggcgaacgtgcgtccttcctcgtttacgaacaagtcgttaaaggacctcttcacgttctcgtagaaagtacggaaacgcctttggtccgcatccttccctaaacgtttcgctacctgctccataatcaaagcgtcgtaggcggaataagcggtgttcgtcaacatggaattcgtcggctcgatagccagccaatcgccgaaaccaccgaagggctgtacatagcgtacggcacgacgctccaaataatccatataagcgaccatggaagcgtaatgttgctccagaatacgcacgtctccgtattgttgatacatttgccacggtacgatcacgccggcttccatccatcccatggcacctccgccatcctccgcgccgtgtggagggaaaccgaccacgggtatatagttcgcgtaactaccgtcatctccttgattatcccgaaccgagtagagccaacgggtgtaaaacggatcgacattcatattataagtagccgtacgagcgaatacctgcgcatcccctgtccagcccatacgctcatcccgttgcggacaatcggtcggaaccgacaggaaattaccccgttggccccagatgatattgctgaacaaacggttgacacgctcgtccgatgtctcataaccgctcgtccgcgcaccgatagattccagcacgatccctttcaccgcctccaagggtaacggcctctccaacccgtgaatctccacgtaacggaaaccatggaacgtaaagcgaggctcatacgtctcacccgccgcatcccctctcaggatatagcgatccgtggaaagggcgctccggtaattatccgtatagacttgccctttcttctccttatacatcgcgatcgtgtacggggcgaccggctcggtagggatcgtttccggataattcatctccccgaaacggatcgtgatttcctgtccggcctttcccttgaaagtcagacggggaacaccgaccatattctgccccatatcatagacatagacgccgggaataggctctaccatggactgagcggtcagggtcacattattttgtatcgggctgcctacatatccttggatctccacatttaccggaggagcggcgaataaggtcgccggtttccatgacgagtcatcaaaacccggagcatcccagccgttcacctctttccgggcatcgtattcctctccattctgaaggccgttaaaagtgatcggtccccggtcataacatttccagctatcattcgtaacgatcgtctcacgagtaccgtcggcatactcgatcacgatctttcccaataaggactggcgggttccgtattgatcctgccaaccggtaaggaaaccgctatgctcgctccaccatccggcgcccaacatcgccccgataccattatcgcccggtcgtagcaaatccgttatatcatacgtattatacatgatacggtaacggtaatccgtccaacccggattcagataatcctttccaaccttctgcccgttcaccgagaactcgtagacacccctagcggtagcatataaacgggcgctcttgaccggtttctctatctttatcgctttccggagcatgggagcggatacgttctcgcccggataccagacattgagctttccctcccctttctccacataagtctcggcaggattgtacagaaacgtattccacgtatcctcgctgatacacaagttggagaatgtagcggtctgccctttaggttgcaggaaaccgatcgcgtacaaacggcaatgataaaccaactctccatccggataaggatacacggtgaaagccccttccttgcctccccagaaatcaccacggctcttccgttctttctcctcgggagtcaaagaggaattcaccaaggtctttccatcgatctctatatccacgaaatatttcaaggcatattgggccgtcgtcaccttcaaccggatatgatgcgccttatgcttatccgaggccgggatgatggaggccagactctccgaggcgtcttgcgtcgtttttccatccgtggtatggcgtagaatgaaacgggcgtcccccgaaccattcaagtccagttcagcagacacataattatcagcgtccctcgccccaaagacaaatgcggctttatcattaccctcggccacccgcacatcatagtcgatcacataatgcgagcgatatttggagagttgtgtctccgacgagccgatccaacgggcgccactccatccggaacccagaagaccggtctcgaaccacgcaggctcggtggaggtaatttccgttcccgattcatcccatacggaaactttccaataatagcgagtggaaggttgcaatgcttttccttgataaactacgccgaccgattccccggaaagaacctttcccgaatcatagatataacgcccggcagccaattgctccggactatcggccacccataaccgataagcctgcccacaggccccatagcgatcggactccatctgccagttaaaacgtggctgactgacatcaattcccagtggattggtttgatactcaacctgtaggttcttcaatacggtaaccgcacccagaggtaaccatccggccagcaaccctaagactatagacaaaatacatcgtgtgctcttcataatacaaagaattaaaatgataacggtacaaaaatatccattatcatcttaactctttgtttcatttttgggagaagatgtagcagttttgacactactcaatctttcctaccatcttggacgggtctacccaacgatcaaactcctcggcggtcacataaccggactcgatagccgcctcccgcaaagtcttattttcttgataggctttctgggcgatagcggcggccttgtaatatcctattttcggattcaaggcggtaaccagcattaaggagctatccagatggcgtttgatgttttcgttcaccggggtaatgccttttacgcaatgttcgctgaaattcaggcaaccgtcaccgatcaagcgggcgctttgcaagaagttcgagataataaccggcttaaatacgttcaactcgaactgcccgttggagccggctatcgagattgtcacgtcgttacccattacttgagcggcgagcatcgtcaatgactcgcattgcgtaggattcacctttcccggcatgatggaggaacccggctcgttctccggcaaatggatctcaccgataccggcacgaggacctgagcccaacattcgtatatcgtttgcgatcttcattaagctgaccgctacggatttcaaggctccatgcgcctcaaccaaggcatcatgggtagctagggcctcgaatttattcggagcggttacaaaaggaagcccagtcaactctgatatcttcttagcgacacattcgtcataattgaccggggcgttaataccggtcccaaccgccgtacctcctaaagccaattcggagatatgcgacagggaatcctttactttccgtataccatattctaattgagccgcatagccactgaactcttgccccaatgtcaatggagtggcatccataaaatgagtcctcccgatcttcacgatcttcatgaactcctcactttttagcgccaacgcacgatacagactctccaatcccgggatcgtcacctccgctatcaccttataggcggcaatatgcatagcggaaggaaacgtatcattggaggattgcgatttattcacgtcatcgttcggaagcagcactttctccttatccgttagctttcctccggtcaacacatgcgcccggttggcgatcacctcattgacattcatattcgtctgggtcccgctccccgtttgccatacaatcaaggggaaggagtcatttaatttacccgccaagatctcgtcgcataccttaccgatcaactcgcatttctccggagacaagacaccggcgtctttattagccaaagccgctccttttttcaagtaagcgaacgcctctatcacctcttcgggcatccggctaatatcggtggcgatcttgaaattattcacgctccgttgtgtttgcggcccataataaacgtccgccggcacttccacctcacctaaggtatctttctctattctatacttcatgacacataagttttattaatctcttctatgtataaactatctggatatcgaattgtttatgttacattcacgagtatatcatgaaaagacatttatcatggaacagaattcagatcatagagaaacggcttatttcgcctccgatgttttttaatagtttttcttctcgtcaataatgtattcgggacgggccttgatctcgtcaaagaggataccgacatattgccctaacacgccgaccgtcaataactgtacacctccaaagaagataatggaagtcatgatagaagtccagccaacctcggcgttactaaaaccatagatcttgcccaacgtgaaccaaaccgccaagattataccgaccaatacggatataaacccgagactcgtcgccaaacgcaacggcttcttcgagaaataaagcattgccgtcgacgcgaatttcagcatcttactaatcggatatttcgtctcgccggcgatacgcgcctcacgctcataataaaacggcacttggtggaagcctacccagcttatcaagccacggatatattttccccgttccttaaaacggtcgaactcattcatcaccttccggtccactaaacggaaatctcccgtatccagcgggaaatggacctcgctcatataattcatcacccggtaaaaagccttggaggtgaacagcttgaaaagactctccccttcccgtgacttacggacgcaataaaccacgttagcattctctctctcctgcacttccagcagatccggaatcaattccggcggatcctgcatatcggcgtcgatgataatcgccaaatcagcgtcacagttattgatacccgccgttaccgccggttgatgaccgaaattccgggagaagtgaatcaccttcacatgaggatcggtagcggctatatgatccaacaaagaacgtgtcttatcctgactaccatcatttatatagataatctccgtagggttcggcaactttaccaagacctctttcgtacgccgatacgattcctcgatcacggcttcctcgttgtaacacgggactataaccgctaacttcttcatgccttttaagctttaaaggtataaaacttatttactaaaaaattaatcaccgtatagaaagccattccaatcaagtggttgtagtaatgatcgatcgtaagtcgggaattcaagatcagtaccaatccgtactgtaaagcataacaaataataaaagcgatcgtgaaccgaaccgcccctttcgtccatccggtggaacttcccttgaaagtccattgcttgttccagatgaaactgtttaatatgcctgccacatatcccgttaagttagataaaccttcccggcatccgaagagtttcatcatcacccagataacgatcatcgttatcaaggtattgctcaacccgactacaccatacttaatagcttgcttaatcgtctccattcttatttataatctcggaaacctcctccgctgtcaattccttgacattcgtgatcgtgaaaacattcgagaggaaatcgccgtattggttacattcattgatcacccgatccaacgtggcttttatatccgtacgcaccgggatcaagaacaccagctccacatactgctcaccgatcgtcaaacgctcgatctcgcagtccgttttcggcagataataagcgaactcccgctcgattgtctgccgctgatattcttggaaaggtttcttgcctttagacgtcatcaagacatagaaacgcagcttctccccttttcctcccaagccggtcgagatataaatttgtttctcgtcggagaaatcggactctaaggagatacgagactccatcaaagccatgtaggcccaatctgtcacttccgggtccggatgctgggtgtattcctccaacaagcggtacgcacggacggatttcgaggtagccaattgagataacaaatatctcttctcggtcttgtccgtggtttcctccgtcaacaaagtgttgtacagggtctcgcactcatcctccgataagggacggggaggccggttttccttccgtacgttttccgagtatttgaaatactccatctgaagttcaaccggcacacgctgttctagtatatggaaatgtccctccatcctgctgaaggaatcacggaactttttgaatacatcaccttcttctttcatagatcgtcttttttcgttattaaactcccataaacaagaaacaagaacaaaggtaatgttttttccggaataaataaaaataacgttatttaagctcccgcataaattaagaacccaagtccgatcacgaataaaataaacatcccgacattcagacgattggaaatggctggcgctcccttgaactctttccagataaggatgccccataaagcggagactagcgtggctccttgccccaatccgtaagatatagccgctcccgccttctctgacgctatcatactgaaagattgaccgatacaccagataacaccccccaatacacccacgagatgcgtactcatatctcccttaaaataaccggatatggagacaggcttaccttccaccggatgtttcattgccaatgtgttaaataagaaattactaacaaatactcctatggcaaaaacaaatacggcggtataaggcgtcaacttcccgggtgccggagaagcgaaattctccatgtccatggaagcggcgacaaaacgatagaaaaaggccatgatcacgccggccacaaccgatataaggatccccttccccgatactttcttggtaccgaccaaggctttcttataagccaggccattcaagatgatggcgaccgtgattaaggctacaccgataaagatataagtcggttcccccttcgccgccccgaaatagttaaccaatacgcctagcaccaaggccaatccgatccctaccggaaaagcgaccgacaatccgcaaatggcgatcgccgcagacaacaagatattggcagcattaaaaataataccgcccaaaaaggcactccctaaactagcgagattcgcttgcgccaaatccggcaggaaactgcgtccttccgtcccgatgctgcccaaggtaaagccggaaatcagagaaaggagcaagacaccaatcacgtagtcccaatagaagaactcatatctccaagtcttggaggctaatttctgcgtattcccccacgatccccaacaaagcatcgtaacgacacagaatatgacagctaaagaataatcttgtacgatatacataaaatactatttaatagatggttgatgcatcatataattctctatcaaggaagcgacctccgtaggcggcatcttctcgatcaaacgaagatcacggccattgggatttgccacccaattgttagtcccctcatcatctacgacatgaaaggtacctcgctctacatcgaaataaggctcataaccttttatagcgaccaataccgccgtatgatcccagctcatgcgcccttccgggtctccctccgtgaaacaaagggcatacgcatcttttacaggactgttctccacgttcatttgcaccagtttctttccggtcaagattacgttcccgatctcaaaaccgctaaagacaatctctgtaggccattcatccgctacgactttagaggcagggacatcgcaatacacattaaattcttttccttccggaaacaggcccgccatagaaaccaaacgtttcactttcttggcgactaattcctttccggagagatcgctatattcatcagctcccgattgaagcaagtcccttaaattagagaagaaaccaatcgtacaaataacaacgctggtatccggttgttcgctcagaatcttacggtacaccttcagggcatccggagcgtcggaagtcttcgccgtatgatgcggatagttagcgggtaactcgtcagtccacttcgttttatgccaagtagtcaaggaggcccccggttcgctctttggtgcccctaccggtatgtccggacggttgaaataagtattcagcacctcaatgcaaggcaccacccgctcatcatggttggaggaaagagtcgcaagaatatttacctgaccgctatccgccaaggcatgcatcaaggccatagcgcccacatcatcatagtccggacctaaatcggtatctagaataagatttaccggttgaggcttatcggtttgagaaacattccccttacaggagataaacaaggcgaataagcccatcagaaacaatgatttcttcataatctttataattttattggtgaacaatctctttcggagcatccgagtaaatcagtatctcaccgaaatgtacggagacatcattacgtggatttagccatttaaacgtagccgtatgttttcccttgggcagctgatacttccaaaacaggtcgttcctacgagtcgtataggatgccggaaggttcgccgtctcaaccagctccccatctaggtacatctctactttcgctacgtatttatcatctttagcgttcacaaagcctttgaatacggcgcctgttccctcaaatggaagttctcctacatcggacaaattcttattaaccgccactttctctatcggatacataccctcgaaagccttctcgtaacgaacggctacaggttgctggcatttgatcgtcacctcgtcacctgaaacggaaccgccgttgcgctctatcacttgcaacgcttgatcgaagcccatttggtaagtcttattcaatgagatggtcgtataggcaaaatccatattctccacctctctcaagttcttcatccaataatccggtatacggctataaccaaggattgttcctaagataccacccgcagaggctgggttgcaatccgaatcttgtccacaacgggtagagatatccaatgtcttatagaaatctccctcaccataaagcaagccgataagaatgtatgcgctattgatcacggcatcgatattgaacggaacgaaaacgccatccggacaaccaatatccgagctccatttcttctcacactcaaaccaagtgcgtttccaatcgtccggatattccttatgccagcggatcacatcgctcatacatttataataggtactttgctccggtatcgtctttaacgcctcggtcacgataaactcgatatcatccgagataaacgataacgaatacatcgccccgacatacacaccgccgtaccaaccgtctccgtaattcatgatatgcccgatcttatcagaaatctcggaagccgtattcggcatacccggcgacatcagtccggcatagtccgcctcgatctgataatccagatcatccgcatgagggttattcagccaatggccggacgccggaggcatgatcccttgcaaaatattataacgtgccgactggttagcatgccataacgtatatcccgccgtagcgaacgccatggcgaatgagtccacaggagcgtccaatcccaaccggtcaaagacatccacgaatgtaaggtccatataaacatcatcgtacaatccgggtacattctcgtaccaccacttgatatatccgtccggccatacgatcggtacgtattcttgaatcatcgttccgttatatttgaactccgtcggaccgccatacgtacagcctatggtttgtccggcccaacctcccttaatcttatccatcaacttttctttactaatcgtaaactcagcgggcaccgtcgtttgatcctttgccgagggttgttgggaacatgaggtcgcccctagaaataaagaggctaccgttatcaccgcaaatactgtttgtttcataatattagattgtttttatagattaatcaaaaatatccacctcattccggtaaggaacagaagattgcgctcccacacgagtcacggaaatggcggaagctttgcaagcgaatctcacggcttcccttaaatcccgcccctcagccaaagccaccgttaaagcgccgttgaaaatatccccggcggcagtagtatcaacggcttccacttttatcgcaggaaccatatctaccatggaatcacaatagatcaaagctccttttgagcctaaagtaacgattacgttctgtactcccatctccattataacttgcgccgccttctttgcggaaacctcatccgtgatcttcacgccagagatcatctctgcctctgtctcattcggggtaatcatatacagatgccggagtaacgtagccgacaaagtttgagctggagccggattcaatattacccgtttgttcttcttcgatgccatcttagcgacaaactcgacagtatccataggaatctccaattgcattaaaatcaaatcggctttttctatcgcctcttccgatttcgctaaatcagaaggtaatagattagcattagctccggaggccaccacaatacagttttcagcatgagcatccaccgtaatcaacgctacgccagatggattcttcggatctgagaaaatataggaagtatcaatcccctcttcctcaaatagctgctgggattgatgtccgaatatatcactgcctgttttacaaataaacgagacctgtccccctaaccgcgcaacagcaaccgcttgattcgctcctttcccacccgggttcataaaaaatgttccgcctaataccgtctctcccggacgagggagatgattcgtctttacgaccatatcggtattgctacttccaacaaccaatatattatgattccgtaagtctttcatgcttttctcttattaatcattcgtttaacaaaaatatcatatattccgcttggtacaccagatttcatgttaatttaaattcattcaccgatgtcgcaaatataaaaagatccaaaatataaaaatcatcaattaatcttcatcgtagataaacccaaatcgatatatttgcatcatacaatttctcatattcactatatatcaaacacttgataacatcaaaagtccatgaataacacatacatattattaatgcttgtcaacaccttgacaaaagctgagaaaagatatttccatctttgcgcaaaccttcaaaacggtgataaggtatacctcaccctttttaatctaatagacgctaatacgtctcccgaacagctgtatacacgcttttgtcagattcaagacgggaagagtttcgagaccgcagtcaaacatttatatcgggtacttctagaatgtttagttagactaagagaaaaacaggatgtccaaacaagaattttcaattatatatcaaaggctggcgtattattcgaacgagaaatatttgatgaagctttcattgaattagataaagcaaaaaaattagcgatcacttatgaaaatgattccttgcttttattgattcggagaacggaactgaaatacttaagcgctcttgattttaaaacaatctcagaaaagcagctggtaaacaagcaaatgaaaatcaatgaagtattaaaatacgcaagaacccttaatcaacatacacagctatacgatattcttaaacaccgtttaattaacaaaggctatatccgttccgacaaacaaaaagaggatttaaacgatctcgtattgagcgaactccatttaatcgcaaacaattcctaccaaggattcgaagcgcaaaagttacatttgctattccaagccacttattatcttaactccggcaattataaatcggctatccgatattaccaagagcttatcaacttatttaacgacaaccaacatttaatattaaatcctcctatctactatttaagtgccatacaaggtattttagacagtttatgtattgccggattatatcatgaaactccctttttcctttctaaactagaagaattaacacaaaatgagtactccactgaattcatcttacatctgaaaaccttgatatatatctacaaatccaatagcttgttacaagccggaaactttgaacaggccttagagctaagggataagcaagaaaatgaattactaaaaaaagtaacatcattaggacttgagtctcaattacggttatatctaagcttcgctgtattaggcatgtatacgaaagattatgtacaagctcgcaaatacatgaaaaagatatttagtttgggaaagttattttgcgcatttccttcttacaagatagcaagattggtaaatcttttactccaagcagaattaggcaattatgatttctttaagaacgaaattatttccatcaaaagaaacatccgcttcgagaaacagacttatatcacagaaaagttaatattcaagtttatacagggctatccgcttccatcatacgagaaagctagaaataaacgctggctacaataccaaaaagacattcaaaaaatcgaacaagataaatatgaacgccaacttttaaagacatttgatgtccttgcttggattgagagtaaattaacccaacggtcgctggcagatatttttgcagaaaaagctcactgatagattaatgccagagcaagtcatgacgtatgtaaaacccggctttccataataccactcatctgctgcaacgcccaatccaccaagccttggatatggggaataagacttaatcctctttccgttaagcagtattctactcggggaggaacttccgcatagacctttcgttcgatcagaccatccgattccaacgtgcgcaaggttacggtcagcatacgttgcgatacatccgcaatggttttatggatatcactaaaacgcatggtaccgttagcacttaaagtgataagcactagcatagaccatttatctcctagccggctcaatacgtctcttacggggcaattccctgtcggatgaaagtttttcattttttaaccttttctatttacttgaatctcaacaatggttacatccatgtaagttccttatttataagtgccttcttgttttctctaaaaaagggacttacttttacaccacaaaagtaataaacttacgaaaaataactattgtatcacttaataatttacgattatggcaaagaaagtagcagttttagcggtaaatccagtaaatggatttggtttgttccaatatttggaatcatttttcgagaatggcattacttataaagtatatgcggttgccgattcaaaagagatcaaaacgaactctggcatagctttgacagtagacgatgtgatcgctaatttaaaagggcatgaagatgaatacgacgcaatggtattcgcttgtggcgatgcggttcctgttttccagcagaacgctagcaaacaatacaatatcgatctaatggatgtgattaagaatttcggggaaaagggtaaaattatgattggacattgcgctgccgctatgctcttcgacttcaccggaatcacggaaggaaagacgctagcggtacatccgttggctaagcctgccattagcaaaggacaaacaacagatgaggattccgtagtcgatggcaatttctttacagcgaaagaagaacattatatctgtactatgatgcctcaagttttggaggccttgaagaaataagttctaagtatcttagcttcatcagcaaagtatcttaagttcgtcggcaaagtaacctaagatactttgccgatgaagttaacttcgttgccgatgtaagttgcctataacatatccaccggattctcattcgccgccctccaactttggaacgtgaccactcctaccgtcaggatactgatccctagcaatgcgacaaaataaatcaaataaccgacaggggctttctccataaaattactggcccatctctccataaaataataggaaactggaatcgagataacaaaactaatgagcaagacctttaaatagactttattcaaacgatatagtatctcactcacgaaagatccatacacccgccttataccaatttctcgccgctgatagtggacatcaaacaataccagacttaaaatacctgccaatgccatccagatagataaaacactggataaaataacccggtcgccaaactggatttctttttcatacagatgccgggaaaatgtatcgcaaaactcaaaatcggataaacatgaaggagaaagttcgctgagcatgtccctaatataaagtaaaacatttcctttatcagcccccggcatcaacttaatataagcgtaaggcatataaaattcctcattcgtcacaaaagcgacaggataagtagctagcagctccgatgctttatgtgtggaagcgatcaccacctcatccgtaaatcctaatacccgggcatcattcccccaaaaggttttcatacggtcacccacatgaaggtttaattgccttttcgctttttggtcaaaaaccaaaagcaactctttattcctcccatcttccatccttgagacacgcccttcgttcgcggtaatatccataagggataaaaaattaggtgatacattcaaataataaaaataaatagtctctccattaaactctgcggccccgccacgattctcattggtcgctcctatcttactagcggcgaaagccacatcctcaattcccgcataaccacgcaaacggttggtaaaattctctttatatttctcggttatctccttattcaattctacgacaactacattatcattcccgaaaccaaaggaatgactccgcattgtctctatctgcttataaataaacagtgacaggacgatcaatataattgaaaccgtatactgaaaaccaaccagacattcccgcattctttttccctttggagacaaaccgaaagaaccattcagcacgattcgctgaggaatagaagtcgcataaatagccggatatgcaccggccaatagtcccgcacacaaagccataaataatccaccccaaaaaactattcccttcatatgaaagcctcctccaatgcaaccttcataaaccaataacagcaacaaggatatagcataagacaatagcgcaaaaagaaaagactctaaccaaagaaatccacgcaaccgccataccgagtcccctagaattttgcggatgttaatactttttattcttgccggaaccaatgccattgtaaagtttataaaattaatcactgctatcaataccactagaaacgaagcgctaaacaacaaatccgtttgtcttttattccctgattttatgtaagtaacactattcatatcattcatataataaatatcgcataaattcaccaaacgggtctgtacctcttggagcctctcgtattgcttgaagggaaatgcttggttaaactgggagcaaatgagatctttttgtgacggatcatctaaaaggacataacaaaggaaaatccagttatcccaatcatccatacaataagtcgacgataaagaagtataaatggcattattcaattgtgtgttttccgggaaatctttataaactcctcctacgactagtgattttcgttccttgctccaaatctcttcttccgcaagcaactccttaccaatagccgatgactcgccaaatatcttccggaccatactttccggcaaaaggcatttctccggatcatctaagcaatctagtgaaccttccaccaattggaagtcaaatatagaaacgatccccggagtacaggttatcaccggttccttataacctttgagaatctcgtccctcccgatcgtaaaataaacttcccctacgtaaggatttatgatcgtacttaccaatatatgtggagaagacgaggcaaatgcttgggcgaaaggcaggatttgcgtaggccattgacttttactcgttacacaatccaatcgataaataacctcggctttcgagtgtattttatcaaaagttcgttcggattccgtacggatagctacgctattaaataaagtaaaggcgattacgaggccgcatatatttagtgttgccgccattttatttgccttcaacgtgataataaaatttcgatatatagagttcatgatacgcttgtttttcgtataaaataaattgacacaactctcctctatgcccttgaagacagggcataatcatgtctaattcagcatacgacaaagcacatagcaagagtatcgttcttgccaaaagacggattttaatcgaacataacttaccctccgttcgtaaaacaacaaagctaccgacagggtaaacaaagcgaggaaaaaagtcaatgaggcaataaggtacaaaagtttctccccaaaagcggagaaagacgtcaaaggagttatgatttcttgaaaagagatgaaagcagccggctctttattcgctattgaaaataaagatgtagaagcacacacccgtaccttcttttgggagaaagaatcgttggcgaccacagtcaatgcggcaaaaacgaccatgcacaaaaacattgcctttaaccacttcataacaagaacaaaattgatcaaaggcaaatgtatggattttcactcaataaatccaaacaataagcatgcaaataacacgaatatgtaaatcattgattatcatcatccttaaaaacatgattatatttctgaaaaaacacgtacatgttttccacaaaagtcgtacatgtttttcggaaaacacgtacacgtttttaccgggtcatacgacagaagacaagaacaaatatagaaatagacaataaccctccttatcatgatgagaatttccctcatcagtcccgtgtaggtttgaggctatatcaaaacccaagccccaactcaaaggcgaaccggaaactatccgtcgagccgaaccaagaatatttagtggtgaacttattcaagaaagtaagccaaatcccgccaccataggaagtatgccaactatgggaacgctcaccgggaaaccagacccgcccataatcaaagcccgcgaatagaccatattttaagggagtgaacggattctttagttttcccatgtccaagcgtaaatccgagtattggtaaaaggattgctttccgataaaacggttctcacggaatccccttaaatcaatcgtggcggcttgatagaactcatagtcattatcgaataataccgttcccttcatcaaggaggcccaagtaaaacgatccgagaaccgtacgttccatgaaaggcttccctgcgcataggggaaattacgttccggctttttcaaattcattttccatccggccgtccattcggtttccaataggggaagccacgaataaggctgtttcgttatccggtaagtagcgccaagacctacgaaataattcgtgcggaaaataggatgatcttctccataaaccgtataaatatatcgatcatccgtacgtttagccttgtacatatccaaagagccaaagaatgtcatcacctcttctttcctcaaatccatctcgaaggatggattaaacatatacgtccggagcttcacccggttataattctttttctcctctttatagcccgccgtattatttccaaatccgaagaagttctcgaagttacggggtgaagaaatggaggcatttaggtataaacgtctccggccatcataattagggaagatacctgcatacatgaaccctttcaaataattatacccgatccgatgctgataggtgaatggggctcgtttaaagccatacatcgtatatgtaaagaacgtacccaaactaatacctttatccgaatcatatattccccacggggtaaaagatatcttatggtattttatcttttggtaatcatatttataatctttatcgtagacatgtattttccggttatgattcaattggtattggttctccccctctccggagatcaagtatatcggaaaatctttccgtgtatttcccttcacttcaaacgtatcgtttcccgcaagcccatataaccacagttccttggtttccttgccggagaattgttgttccaacctacagtctccggtctcgggatcataaatccgtaaaacagtccggtccggcgcttgccgctcgatcaagaaataatcggattgattggttccggcaaccactggcgtacgttgcaataagcgataatattggctggcaaccgcttccagctctagcctccttcgtttcaactttcgtttaatcagttctatctcatcatgttttacaccttccggcaaataagtaaaagcgctatcgatcaaagagtcggtcatctgtctccgaatttcttgggcttggcgtatccaaaccgactcatcactgcggcctgctaccgccatatccagcgcaaaagctagcttattgattttctttgtatcttttaaaatcaggctatcataattacagataaaatccaacgataacatcttcaacatttgcttgaacaatactccgtccaccttcgtgaaagcatgattcctatcgatcacgatcggggtataaattacgctatcattgacggtatgtgactgccactcccagttttcgttcgtcttattccaatctccggtccacatatcgaaaatacgttcccgaatgtatagattttgatccgccatatagtttttactcacttgaaggctgtctagaaagtcttccgtggtatacaaattagaccttaaattaatatccggaacattgattagattgaccagcctatcttgtatatcgctgccgtccgcaactgtgtctttccgtatgtgggaaggaatatagtaaatacgggagggagaaaaactcaatcccgcggacttcgctaaataatctgcgaccaaaaaggtatagggattgataatcgtataagcatctcctaagaactcatccaaatatgtattcttaaaatcagtcttattatatatttcccggaaaaacttcgactccaagaaacttgtagagccacccaagggctttagcaaatacaattgcttacgcttattctccaacaataatccgtgaaacccttccgcttgcccgacgatatccatcccaccccccaacgtttctatcgtagccgaaggaaccctgatcgggatcgtataaaggtgacgataatgcctcccccacatccaattatagatcttgcttttaccactatccgcttgcggataaatggacttacgtacccaatcttgagattgggaataaagcaagccgggcataagcacaaagagtatgagtatgatatatttataggacgaccgcatggacaatttctttctatctctgttttactaataacaggggtaagacaagagttgttttgtttttttagcctaagagaagaatcaaggacttgacgtataaacaagcgataattatatatttttggtagacaaatctaaaatcatgctataaaacattattcagaaaggttataaatacaaagaagaaagttacttttacacgcaatttcaataatattgatacgcatgaagaacataaatacactgtcgggcttgtctgttgctaacttcagcaagcaaattgacgggaaagaaacggcgctttataccctgtgtaacaaggttggagcagagctagcgatcacgaattatggagcgaaaatcgtctcactgatggttccggataagaacggaaaaatgaccgatgtcgttactggccataattcgattgaagagtacttaacatcagaagaaccttatttcggtgccatttgcggtcgttatggaaatcgtatcgccgctggaaaattcacgatcgacggtattacttatgacaaattagccataaataatggccccaatagcttgcatggcggaatcaagggattcaatgcggtcgtatgggacgccaaacaaatagacgagcaaaccattgagttgaaatatacctccgccgatggcgaggaaggtttccccggagaactaaagacaaccgtaacttatcatctgacaaatgagaatgaggtcgttatctcctatcaagcctctacggacaaacctacggtcttgaatctaaccaatcattcttattttaacctatccggtgcgggagacccttatataggagaccatattctcacgatcaacgccgactattatctgcctacagacaatacggcaatcccgtacggacctaaagagaaggtagaaggtacaccgatggacttccggactcctcatgaggtaggcgaacgaatcaatgacaatttcgaacagcttatattcggtaagggatatgaccacacgtacatattaaataaagaggacaacgaactttcttactgcgctcgctgctcctcccccaagaccggtatcgtaatggaaacttatacgactcaaccgggcgtgcaattatacacaggtaactggatgactgggaatttcgaaggtaagaacggacaacgctacccggaacgggccgctttatgtctggaaacccaacatttccccgatagccccaacaaaccggaatatccgacaacggaactccgcccgggcgaggttttccaaagtactactatttataaattcagtgtagaataagagaataatttaagtaatctaataatctaaaacaacaaaaaagaaatggaatcaacagcaaaaaagaattacacattgcctattatcatgatggtggctctcttcttcatgatatctttcgtgacgggtctacagaacccattcggtatcatcgttaagaaccagttcgctgccagcaacttcatgtcgcagctgggtaacgcggctaactttatcgcctatgccttcatgggtattccggccggtatgctattgcagaagatcggttacaagaaaaccgctttgttagcgatcatcgtaggtttctgtggtgtaggtatttcttatctttccggtgtggctggtagctacgctgtttatttgacaggtgctttcgtgtccggtttctctatgtgtatgttgaataccgtagtaaacccgatgttgaacacgctaggtggtggtggaaacaaaggtaaccaattaattcaggttgccggctccgtaaactctatcggcgctacgatcgttccggtattggttggttatttgatcggtgacgctgccaaggctcagatcagtgacgctaacccggcattgttcttggctatgggtatctttgccatcgtatttatcgtattgttctgcatgcaaattccagaaccgcatatggttaaggaaaatgaagccaagactccggacaagcacagcgcgctttctttccgtcacttcattttaggtgccatcgcaatcttcttgtatgtgggtgtcgaagtaggtattcctaacttcatgaacttgttcgctacttcttctgagatcggtatcgatcctacagtagccggttctatcgtgggtacatattggttcttgatgatgatcggacgtttgttcggtgcctctttcggagctaagatctctagtaaggcgatgttgtcatcagccgccacggtaggtatgatctttatcttgatcgctatctttgcccctgctacgactaaagttagtatgcctgtattcttgtctgatatctctttcggtatggttgaggttccggttggaatcatgttcatggctctttgtggtttatgtacttccatcatgtggggtggtatcttcaacttggcagtagaaggtttaggtaaatatacggcagccgcttccggtatcttcatggtgatggtttgcggtggaggtattcttccgttgatccaaggagctgtagccgacgctggcggtttcattactagcttttgggtggtattcctaggattggcatatttgctatattacgctttgatcggtagcaagaacgtaaacaaagacattcctgttgaataataaggacaggacataatatgataaagaagaaattatccggcagagttatctgaatgggtaatttcttcttgtttattcaattatttaccttaatcaaattaagtatcatgcaacaaaaaatcagaactaaatttaaagagttatttaataccgaaggtagcttatacacatccccgggacgtattaacttgatcggtgaacacactgattataatggaggtttcgtttttccgggtgctgtagataaagggatgatcgccgagatcaaaccgaatgggacgggcaaagtccgggcgttctccatcgacttaaatgattacgctgaatttggcttgaccgaggaggacgctccttccgcaagctgggcaagatatatctttggcgtatgccgggagattattaaacgaggtggtaatatccaaggtttcgataccgtattcgctggagacgtacctctgggcgctggaatgtcttcttccgccgcattggaaagtacttatgctttcgcattgaatgacttattctcattgaatatcgataaattcgagttggctaagatcggtcaagctacagaacataattattgtggcgtgaattgcggtatcatggaccaattcgcttccgtattcggcaaggccggaagtttgatccgcttggattgccgttctttggaatataaatattatccgtttaatccggttggttacaaactcgtgttattggattcggtcgttaagcatgagttggcatcctcagcctacaacaaacgccgtaaatcctgcgagaacgtggtagccgccattcgccgcaaccatccggaagtagagttcttacgtgacgctacgatggagatgctgaacgaggtaaaagcggatgtcagcgcagaggattacatgcgtgccgaatatgttatcgaggaaatccaacgtgtactcgacgtatgtgccgctttggagaaaggcgactatgagactgtcggcgaaaagatgtacggcacgcatcaaggtatgagcaagctttatgaagttagctgcgaggaactggatttcttgaacgatatcgccaaggaatgtggtgtaacgggttctcgtgtcatgggtggaggattcggcggttgtacgatcaacttggttaaggatgagttgtacgacgatttcgtgaagaaagccttctccgcttataaagagaagtttggccgtgaacctaaattatataatgtagtaatcagcgacggagcacgcaagctctgttaatctttaaaatccataaaacgatgtcagcagctttttatcaagacgaagtaaaattctatgttgccgtagattgtatcattctagggtttaacaataaggagttgaatgttttattatacaaacgttcgttcgagccgatgaaaggacagtggtctcttatgggaggcttcgtgaaatccggggaaagcgtggatgaagcagcatcacgggtattaaccgattgcacgggcatcgagcatctttttatggaacaaataggggcttacggagatgtatcgcgtgacctaggggagcgggttatctccgtagcttactattccttggtgaatatgaatgattttagtcccgagatattggaaagccataacgctacttggaccaagatatccgagcttcccgacttgattttcgaccataaccaaatgataaacgatacgttgtccgtccttaaaaagaaagcggcaagccgccctatcggtttcaatttgcttcccgagcaatttaccttgccccaactacagacattgtatgaggccatctaccaaacccttttagacaaacgaaacttccgcaaaaagctaaacgccatggatattttggaaaaactggatatcaaagacaagaaaagttctaaacgaggagctttcctctacaaattcaacgagaaaaaatacaacaaatgggttgaacagggttttgacttctcgctctaatccgaatgatgtatacccgcaagaataaggcgctcagcgggctatcttaaatatctctcaatttatcaaaaatataagaagataggaacctttaccgaaaaggaattgtttgattgatataacggctcttacaaagagtttgattatctttgcagtcaaataaataattcatctgataaaatgaacgatattcaagtaatgaacaaagcagctgataacatccgtatactggctgcgtcaatggtggagaaagcgaactccgggcacccgggtggcgctatgggtggtgcagactttgttaacgtactgttctcagagttcttaatatacgatcccaagaatcccaaatgggaaggacgcgatcgtttcttccttgacccggggcatatgtctccgatgctttattccgtactggctttaagcggcaaattcacattggatgaacttcaacagttccgccaatggggaagcgttactccgggacatcctgaggtagacgttatgcgtggtatcgaaaacacgtccggcccgctgggacaaggacatacttatgcggtaggtgcggctatcgcggctaaattcttgaaagcacgtctgggtgaggaagtaatgaaccagactatttacgcatatatttccgatggaggtatccaagaggaaatctcccaaggtgccggacgtatcgccggaactttaggactggataacttgatcatgttctacgacgctaacaacgtgcagctatctaccaaggtagaagacgtcgatgcggagaacgtagccatgaaatacgaggcttggggctggaaagtcattcaaataaacggtaacgacgtaaacgagatccgcaaggctttaaaagaggctaaggcagagatctccaaaccgactttgatcatcggtaacaccgttatggggaaaggtgctgtcggcgctgataacagctgttacgagaataaggtatctactcacggacaacctttatccgcggcaggagcttccatcgcagatacgatcaagaacctaggaggcgatccggaacatccgttcgcaatccttcctgaggtagccgaattatatgccaaacgtgcgaaagaactggaagtaatcgtcgccgagcgttacgccgtgaaagacctctgggcgaaagctcacccggacttagcggctaagatggagcaatggttctccggtaaggctcctaaaatcgactgggccgcaatcgagcagaaagcgaaccaagcgacccgtgccgcttccgctaccgtattaggtgtgcttgctacccatgtagaaaacatgatcgtagcttccgccgacctttccaattccgataagacagacggcttcttgaaaaagactcatgctttcgtgaaaggcgactttagcggagctttcttccaagcgggtgtagccgagctttctatggcttgtatctgtatcggtatgtctttacatggtggcgtgatcgccgcttgcggtactttcttcgtattctccgattacatgaagcctgcgttacgtatggccgcattgatggagcagcccgttaagttcatctggacacacgacgctttccgtgttggagaagacggacctacgcacgagccggtagagcaagaagctcaagttcgtttattagagaaattgaagaatcataagggacacaactccatgttggtacttcgtccggcagacgttgtggagacaacagtcgcatggaaactagcgatggagaacgtttacactcctaccgcattgattctttctcgtcagaatatcacagatcttcccgctaaggaaaaccgctatcaagaggctttgcaagcggaaaagggtgcctatatcgtcaatgaagacgctaatgcggatgtaattcttttggcttccggttccgaggtatcgactttggtcgagggcgccgccctgcttcgtgccgatggcataaaggttcgtatcgtttccgtaccttccgaaggtctattccgttcacaaagcaaagaataccaagaatccattcttcccgcaggaagcaagattttcggcttaaccgctggtcttccggttaatctggaagggttggtaggtcctaacggcaaggtatggggacttgaatccttcggtttctccgccccttacaaagtattggacgagaaattaggtttcacggctaagaacgtttataaccaagtaaaagaattattagcataaagatgggtatagtaggtttgtgtagcgatcacgctggttttgagttaaaagaatatataaagacaatcctcgatgaaaggggattgtcttataaagattttggaacttattcctctgacagttgcgattatccggatttcgcccatctgatgggcaaggccgtagaagctggtgaggtttatccgggaatagctgtctgcggtacagggaatggcattagtatgaccttgaacaaacatcggggtgtccgtgccgccttatgctggctagaggatatcgcgaaactggcacgtgagcataacgacgcgaacgtgttatcaatgcccggtcgttttatcagcaaggaagaggctaagaaaatcgttgacatattcttggatacaccttttgagggtggtcgccaccaacgtcgtatagacaagatccctttgtaaagtccgcgaaaaagtcactttataaaataaagaaggctctcccatggttcgcttaccattcggagagccttttcgtatcaccgtttaaacggcaacgtacatataatagatgacggatgccaaatttgaagactttctactattaaacattcgatctcgctttttgttctttccatttagttaaaaatgtacgggctaccgtcgggaataactccagcaacagtatttctttctcattctcagccaataacacatccaaatcctccaatacaggattctcttgcatcacgtaatgggaaccgtcgtaaggcacctcattttgtacgccggtgattttcaaccggaacgccggatctaccggaatcggcgtcttgccatactctccttttaccaaggcgataaactggttggaaggattactatacatcgggcggcctttcagctcatccagcgcacaggaaaccgcttgcgccccgataatctggctcgtaggcgtcaccaacggaggcaagccggcatccatccgtacttgcggaatgagcgacatcgccttctccaacaagtcgatctgccccaattgcttcaactgggcaaccatattcgtatacatacctcccgggatctgcgcttttttcaccaactcgttcggctcggggaaatcaaaatactcctcgatcgcacggcaataaagcagcaaatcgtcctccttatctttccgggcggcctcgatggcatcgttgaagaagcggtcgatctcggcggggaaactatcctctacgggattaaagggcctcgggaatttcttcgcggtatcgaacgcggaaagctccttgcggatcgtcaataactccttgttgatcttagcgatcgcgtccatatcaagatccagctcgatacccaatttcttgcagaagatatagaccagctccacggcaggagcggccggtcctccggcgaagttccagatattcgtatcaacgatgtccaccccattgataatggcggatacgaccgacgccaatccgtaaccgggcgtacaatgcgtatggaaatccaccggtaccttcaggctcttcttgaacaatcgcaccaattccgccgtacgagccggaggtatcaaaccactcatatccttcagggtgatcatatcagcgcccagcgactccagttgaagggccttgtttaagaaatactcattcgtaaaaacaggcttatgcaagggccgtccatgcaaggcggcttttatacgttctaccggggaatggtgaggatctatcgtataacagatggcacagtcagcctttcccccgaatttcttcacataacggatcgtggatttcacgttatccacgtcgttcaaagcatcgaaaatacgcatgatatcgataccagaacgaatcgagttccggcaaaagccttctataatctcgtcgggataaggattataaccgaataaattacgcccacgggaaagagcggataacttggaggaatttcctattttctctttgatgagctctaaacgatcccacggattctcacctaaataacgcatcacggaatcgggaaccgccccaccccatacttccatggcataaaagcctgcgtctttgtagtaaggaagtacacggtctatttgcgcttgagacattcttgtagcgaatgccgattgctgaccatcgcgaagagtcaaatcacgaatcaataatttacgtatcataccaaatttgtttagatcgttttagtcaatattctgattatataacaagatctaaacaaatttgataaagattacggggttaataataaccaatttttctaaaacctcagtcttttacttccacaacgatcattacgggaaagtggtcggaaggggtacgggcctcatatttactcaatgacacctctttcgggaaattaccgttttgctccttccgggcgctttctttcgcctcggagcgataagtatccgttaagattccatacttcttcacctcaaattctttcgtaagaaaaaggtggtcgatacggctatcggtcttgcggtccggatggaaaccgttgaaggtaccattcggggcatagcggaaatcagcgatctcataagagtcacgcatgataccggaaccatctaacaactgataggactcacttgtttggtccacgttgaaatcgccggtaaggatagcgggaagtttcttggggaactccttgatcttctccaagatcagcttggcgctctcggcacgtgcctgtacgcctacatggtccatgtgaaggttgaagaacaagaaagtgaaaccggtttgcttatcccggaactcaccccacgtacagatacggggaaggacggcatcccagcccttattcggacggtcggtgatctcggatagccagaaatcgccatgctccaaaacctcgaacttgtccgtgcggtaaaagatagccgaatgctctcccgcccgcttaccatcgtcacgtcccacaccgatataatcatatccgggcatggcttgcctcaagtcctgcaattgcggatatttgccctcttgggtaccaaagatatcgaacccgtgaaattgtacgatctgggcgatgtagggatagcgttgtccccaaccgttaccgttcgtggaatcgccgccgttggcgttacgcaaattataggtggcaaccaccattgtctccgcctgtaaggttaatacggcgcaaaaaagaaaaataaaagaataaataactttcttcatgatctatgtttttaattatcctcgaaagctgataatatcggacgggcgatccacacctgcggctgcggtacgtccaataggtaagccatcgtaccggcgatatcatataccatcgtgctctccgggatcttgaagcctttctttacgttctttccatagaaaacgatcggggtttgcatctcgttcatcgtcttgccaccgtgaccggtctcgataccgccgtggtcggccgtcagtataaccaccgtatcatccatgatacccgcctcacgaacggcgtccatcacttgcgtcaagcaactgtccaaatgattcaccatggcgaaatactccggggaactccatcccttgccatgtccggtaccatccggctgatcgtatataatcgcgcaaaggttcggcttcttctccttgatatactgaacggctaccggggtacatccgttcgggttctcagccgacatcggggcatgcttacggaagctcatggccaaggtatccaccagataattcatgccttcccactcatagatatagccaatctcagcctcgggagccttatcccggtacatgccgaagatattcgggaaacggttgtcgctattcacgacacgggaaggaagctccggcgtacgagatccccactccgtatatccgtgcaactccggtcctgctcccataaacatggaagcccaattacaagcactcgacgaaggcaggatcgaacgattctctaacgtggaagcaccttccgccatcatcttacggaaagtaggcatatccgccccattattcaagcaatgggcgctcaagccgtcgaaaccaatcaagattacatgctttggcagattcttctctttcaaaggcacttgctgaggtgccgtattacaggcgctcaggcagtatgcgattaccgcacaacaaataaataagatttgctttttcatcttaccgtgtttttcttttatgattaatattgaagtatcttagattccgtcagacaaaggtacaaagtttaaataaagttcaaaaagatcatttatctttgtagcttaatctaatcttattttaataaatacgtatgtacaaacatttcctgacaagcgtattgcttgtatttttcatgctatcctgtagcaaactttccccttttgaaggaaagatgcgagaatgcgtacaaacctccctaagctggagaaacgacacgaccggtatctgggaaacagcaggctggtggaactcggcgaacgtattaaccgccaccattcgctacggtgccgtaaccaaagatccggccatcccttctgtcatagaggatgtattcgagaaagcccgtcattaccaagtaggcgtagactcaaccggtactccccgttattgcgacaacttcatcaacgattattacgatgacgagggttggtgggcattggcatggatcgaggcctccaaactgaccggagagaaaaagtacctagatatggccgagatcatattcgatgatatgacaaccggctggagcgacgcttgcggaggcggcattttctggaagaagaatccactgcattacaagaactcgattgccaacaacttattctcccttacggcgatccgtttatataaagcgacccagaatccggcatacctcgactggttcaagaagaacgtagattggtatatgcgaaccggcatgatcaatacgaacatctaccaaatcgaagacggtaccaaagacgattgtacccccaaccgaaatgcccactacacctataaccaaggcgtagccatcgctgtcttagccgagatgtatctccaaaccaacgataaatcttatttggaactagcggaaaagatcgccgacgctaccatcaccacacaattgataactgacgagggtattctccgtgaaatgaagcccgagatcgatgatagcaacgacggtgtccaatttaagggtatcttcatccgtcatttagccttcctgtatgaagtgacaaagaatccggcttataaagatttcatcttgaaaaatgcggaatccatcatcacaaaagattatgatcccacatccaaaagcttcggttgttattggtacggccctttccacaaggaaaactcggcagcaaacgcttgcgctttggaatgcgtgatagaggcttatgatttaacgaaataggtatccggaaagacgcagcttgtcgttattcacacagccagcgggcgatattccgctctggctcccccggagctggaacggatgtaacatacggctctggctcattgacaaaaaaacgggacggcggacatctccgccgtcccgcccaaaagagacagccttatctctgtttgtattcatgtcaaggctggttttttactgataacggggccatataaaccctgtttttcatatcgtgcacaaacataagacttctttttcacaaaagaacaaattccttcttctttctagaaatacatgctttataacataccgcactccctctcggttgctagcgtggacttctattacaaaggataggcgacgcagcacgctacgtctccctccgttttctttttaccaataataggtatccataatctccttcattttaggggtattcgtgtcctcatccttaacatctttccgcagcttcagcatctcctccttcatttgccggatgatcttggcgtattggggatcgttataagcgttgtgattctcacgaggatcggattgaaggtcgtaaaactcccatgctggtgtcgtggtcttatcctccgaaccagtcatattcagacggtcgccatagaaaaacatcagtttataccgctcattacggatacccatatgggccggacggttcgaatgttgggtccaataacgataatacatctccttacgccaatcctttggggtatttcctttcagattatcgcgaaaactatggccctgcgattctttcggggtcttcacgcctgcgtaatccgccagcaaagaggcaaaatccacgttcaagatcatatccttattgcgggtccccgccgggatctctttcgggtaacggatcacgaaaggcatacgtagagactcctcatacatcatacgcttatcgaagaaaccatgctctcctaaaaaataaccttggtcggatacgtacaccacgatcgtattatcggcgattcccatatcgtccagcgctttcaataacttcccgatattatcgtcgatcgtagccccgcaacgcagatagtcgcgcaccaatttctggtaagcggcgctacgggcggcagatcgatgcatgcccttcgtcgtaaaaggcaactccggataccggcaccaccatttatcagggtcttgcgacgccacgtcccaacgacgggccaactcctccaaaggctgtccggagaaggtacgtccattcgtctccggcccccaatcaaataagttttccggttccgggaaaacaacgccgtcatacaaatgcctcatccgttccggaaaatcccaaggttcgtgtgtagccttgaaatgacaacacatcatgaaaggccggtccttatcggcctctttcatccaacggatcgccttatccgtcacgatatccgtggagaaacctcgtacccgctccccgaaattacgctcacccggccaagggtccgtacagtttatgaaagtagggtcccggtactcgccttggtcatgaaacacggaatagaagtcgaaaccttgcggttgcgttttcagatgccatttaccgaccaaagcggtctgatagcctcccgcccgcatttgcttggcgatattatcctgctccggatcaaaggaatcacttaacgtgtaaacaccgttcacgtgactataggctccggtcaagatcgccgcacgactaggggaagagatcgagttcgtacaaaaacaattatctaacacgcagccctccgcggccaagcgacggatattctcgttccgggcataatcacccaacacccccccgtaaatgccccaagactgggaagtatgatcatccgaaaggataaacaagatattgggacgttcctcttgcgccggtttatcggcggcaaaaaggaactgcccgttccccgaaagacaacaggcagtcattccgatacttatgatcgattgtttcataggtcatgacgttttttcccttgtactagacccggttccctacgctccgttccctttacgcgcgttaggttatcccctaactcatgacgtttcaggtcggcgatcttcatcaatttcgcggcttcctcaggatactgggtgatcacgttataacgctctcccggatcacggcgcaagtcatacatctcaggtttcatgatctccagattcgtcaacttacccggctggccgtcgtttcccggctcataagccccgtaagtaacgtatttatgagggaataccagcttaaacataccgtccgtgacagcctccaagtcattcttgttataataatagacaaaggattcacgaggattcgcgtctttcttgccctctatcaatgataagatactaacgccatcaatcttgcgagtaggcagcggggcctgcgtgatctcggcgaacgtaggaagaaggtcgatattagaagctaacttattacaagtcgtgcccggtaacgtcttacctttccagtacatgatacaaggaacccggttaccaccatcaaaggtcgtagcctttgcctcacgtaacccaccggctgaaccagcatgattcccgtaattggtccaaggaccattatcggaagtcaagatcaccaacgtattatcttccaagcccagctcacgcaatgtcttgaatatctcacctacactccagtcgatctccatcatcacgtcgccatataaaccctgctcgctctttcccttgaatttatcggaaacggccaacggtacatggggcatattatgggccagatacaagaagaaaggcttattcttattcttcttgatgaaattaacagaacgggtggtataatccgtagtcaaccgtgtttggtccgtattataaccgataatctcgtttccgtcataagtcggcaaatccgggaaattaaagacctcaccttgttgcgggtggaatggccacatatcgttagaatacggcaaaccataatactcatcgaagccattttgcaagggaagaaattccttttggctacctaaatgccatttaccgaagatagcggtactatatcctttctgtttcaatacctctgcgatcgtcatctcatccggatggattccgtagttcgaatccggtcccggagcgccggcgaaaccgatacgattcggatagcaaccggtcaacaagccggcacgagacgctccactgatcggctgtcctaccaaaaagtgcgtaaaacgaacgccttccgccgccatcttatcgatattcggagtggtatatccgtaagctccattaaaagaaaaatctccgtaacccacatcatccaaattgattaggacgatattcgtgtaatcagcggctatgcctgccattgaaaaagcagaggcggccgtcagtaacattagtttattcttcatgatattatttattgaaatattggctttgaagtgccatcctgtgtttggcacttcaaagataacagtttttaatttacccaagaattaatcccagttcggattttgctccaaatttggattcaagactgtttggttataagggatcggccataaataatctcgtttcggattaaaagaacgtttcacgacttctattccatcataattatgcatcataccattattctctttctcggcggttttccaacgcaagatatccgaatagtagagtccttcaaaggtcaactcgatacggcgttcacggcggattacctcacgcatctgatctttcgtcaaaccttttggtacttccggcatattgatatccggacgcctacgcaattggttgatggcatcataaactgactgatcaggaccactcgcctcattctgcgcctcggcatacgtcaacagaacttccgcataacgaattaaaatgaaattgaaagccgaacgttctactaaaggaatcgttacatcatcctcataagaagtgtatttcttcacaccgaaacccgtagtcgccacatcttcttttgtgatcgtctttcctaaatacggataaccgatgcaaacgatcgatttcaataaacggggatctctgttctcatatggacgagccggatcataaagcggtgactcttctatcgtcttcccgtcaatacagagatatgtatcaaccagttccttcaagggagccggacgattcaagcgccagatattctgatcataatccgttggatactccggcaatttcgcttctatatcaaagattacctcacaattatatttattatcttcgctaaagaaatgacgataatcattgaataattgataaacgccagactccattacctgcttagcagcttgggccgcctccgcccaacgagaattatataataaagtacgggcttttaacgctaatgcggcaccttttgtcgcacgtcccaagtctgagctagcataggtgtccggtagcacggcagcggcctcctccaaatccttgacaatctgattcactacctcttccttggaattgcgaggtaattcggcttgctcatccgcattgggagcatctataatcagcggtacacctccgaatttatcgaccagacttaaataatagaaagctcgtaagaacttggcttcacccaccatcttcgccttctccgactcatccatatcgacacctccgacattagcgatgaaagtattcgtacggccaataccaacgtaacagttcttccataaacttccgattagagccgtagtagacaaatgttcaccctttccaatcgcttgcgtaccattcgcctcgttataaggcatcgcattcgctgtcagcatatcgaattccatcgtatgcaatgaacgccaaggtttcaatgcgttgtaacatcccattataccggcgctcgcatgctcttttgtcttccagaatgtttccgtggaatattgatcggaaggatctacatccaaccagctatcgcaagcggttaaactcatacaagcgacagcgacacatatcatcttatatattttacgtctcatattattattccttattatttaaaatgtgacattaacacctgccgtataagtccgtacagacggataggcataccagttgcttcccttcaagttcttctccggatcaaaatccttcatcggagagaacgtgaataagttttgcgcattgacaaagacctttaatctcttaaccacaccgcttttcaagaaagaggccggtacgttataagaaagttgcaagttcttcaaacgtaaataagaggcatttctcaaccagaaatcatttgtacggaaattctcgttcaagcatccttcatacgtagtcaagataggcaatgtagcgctggttccccgctcgggagtccaagcatccgtcaaccattgttccggcaaaccacagccaaaccataaaggagtagcaccaatgcggtctccatatgtatagacatcagttacaccttggaagaatgcgctcagatcccaatccttatatcctaagttgatattgaatccataagttatcttaggaatcacaccaccacgtatctggcggtcatcttcggtaattttcccatctccattcgtatcctcaaacttcagatatcccggtttagtagctgcggtttgatacggactattcttgatttcctcctcagattggaaaataccgatagcatgaagcatataataagaatcgataggctttccttcttccaagataaacattccatcaatgattgtttgccccttcaagctaacgatcttattcttgataaaggtcatatttccatttacctcgtaacggaagtccccgatattgttccgataccccatattcaactcgaaacctttattgctcacctcgccgatattacggatcgggccatccagaccacctacttgatccggcaaagtaacctttcgcaagatgtcggaagtacgtttatcaaagaactcgaaagagaaatctaagtttccgtttaacaagctagcgtcaataccgacattcgtcatggtcgttgtctcccatgtgatgttcggatcattataggcggtaatagccgctccggattgcatcgctccattcaacgggtagttataatccgtaattgaaccatcattttttatcaccttcaagttcattaggtccacgtaacggaacaaatcgatacgctcgttacccaattgtccccaagaagctctcaatttcagattgtagatccaaggaatatctttcataaactcttcctcgctcaaacgccatccggcagagaatgatgggaaaataccccaacgatttcctttggcaaaacgagacgaaccatcataacgaaagttaccctcaaataaataacgatccttataaccataattcaccctaccaaagtaagacatcaagactgatctcgaggaagtacccgctacactcggattactagaacctgcgtttaattcgtgcaactcgttccctaagaaaccttctaccttagcggaaaactcagtcttatcatcgctctcaaaactatagccagccaatacttttacgtcatgggcatcattgaacttcttgccccaagataaagtattgaatactgtaactgccaagtcattcttatcacctttataggcatggcgtgtattctgaccgtcataaaccactcgtttctcctcattggtcttcaactgatattcgtatacatcaggcgcaaaacgagattgcagataatcatatttgtttaaaccgacattcaggttataaacgatatcaaacggaagcttatattccgcagacaaattcgccaacatacgcaaggacttatgcttgttctcgccctcatcggccaacgccaacggatggcgatagatattatgcccaggagtacggataaaggtatccgcatagcgaccatcggccgtataagtcgggtggaaagcctgcgctttataagtcatctccactaagtttgccacacccgctaccggctcattatagatctgataatgcgcattgatattagcgccgatcttcaaacggctatttacctgagcagtcgtattcacagctaaggtatatttattggaatccgttccacgcaatactccattttgatcaccatagcctaaagatacggaatacgtatatttatcatcacctccggagaaacgcatgttatgctccataataaaggcattattatacatgatatccaaccaattattctgcggatacataatcgggtctgttaacatgccttgtttgtactcctcgattaacgcgtcagaataatccaccgttagtttaccttcgttccgttgcgcttggtttctcatttccataaacacgaccggatcatatacgaagttaggcagataggtagcctgctgcactccgaaatagttattataatcgacggtaaacttacctttctttcccccctttgtctttaccaagacaacgccattcgccgcacgagaaccgtagatagcggaagaagccgcatctttcaatacggaaatactctcaatatcattcggatttaccgcttccaacgggaactcgataccatccaccaaaatcaatgggttattatcgttcaaggttccctgaccacgaatacgaatcgtcgccccgtccgctcccggctgagcacccgcttgatttacgtaaacaccttgcgtaccttgcaacgcttgggtcgagttggtgatcgggcgattctccaacgtctccgcatccaaagaggagatcgctcccgttaaattcactttcttctgcgttccgtaacctacgaccacaacctcatccaacttctgggtatcctcggacaggctaaccattactttcgaagaattaccaacctcgaccgtacgatccgtataaccgatataagaaactaccaagatcgcattgtccggtacttccagactgaagtttccatcgatatccgtaatcgttccgttcgtagtgcctttaacgacaacattcgccccgataatgggttctcccaaggcatcttttacttgcccggtaatctttcgtggcgaagactggaataaggcattcggatgtgagacacttgaaacactctttgacttaattataatctgccggtctacaatctcatattggtatcccgtatttttcaaggcttgctctaagacctcctctaacgaagcattatttgcttttacactcgttttcctatttacatttacttgattatcattcaagaagaacgtgtactcactatttttctctatttcttttagcacttccgatatactgcaatcctgtttattcatggaaagcttataattctgtccataggtagaagcggatacagtgcatgcgaaagccaaggataacaacgcacttatcttcatgactcggtttacttttctgatttttttcataactttgtaatgtttctgatgaataaattagcaggcgtgtcggcctctcaactcctaacgcctgccgtcaagaacatttgatcaggaggagaaacctagtttttcctcctgttttttattagactcaagaactgttaacaagcatatctcctagaatttaacgttagacactcatttatctccctttatatatagttcatattcattgtctttctctctgtatttaatgggcgacgtattgctcagcataaacaggattcgctccaaggactcatcccgtaccttaaacgtaaaccgatatttctccgctatctccttcgggcactttatcttccgcccgaaccaaggctccagacgggtaaggatcatgctcaagcgttcgttctcaaaactgaggacaccgttacgccaacccgaatactcctcggcattaaccgtcttaactctaacggtattcgcttgtttgtcgaaaaccaacatctcgttcgggttcaatatcacctcacgcctgttcttcacattgggacctcccaagccaatcttcaccttaccgtttaacaggatcgtctccaacttgctctcggaatcataattgaaaacctcgaaggccgtgcccaaggccgttacatccatgttcttggtatgcacggtaaatggtctttcccgatctttcgctacgtcgaagaaggcttgcccttttaattccacatcacgggtcttgccatcgaaactctttgggtaaatcaactggctattcggccccattctcacggtcgtaccgtccgataaggaaaccggctctatgcaacggacaccggaggccattacatatatatattgatcttctttcgtatgagaccaataaactacgcttcctacacctaaaagtagcaatatggaggcggctatcgccgtaatcttatagacccagagtttacggacaccgtttgtcgccattgtccgggctatgattcgttcccacatgcgattccccaccacgggattcacgcgatccgcagcctcgtcccattgggaacgcatacgctcttccactttggggtcacacagcaaacgttgccgatctttctcatccagagcatctcgcatcaacttcttcaatatcgttctcgtatcttcgctcatgtttattattcttgttctatttataaatacacgccacgactccctcccccctattggaagataaaaaaattcgcttaggttaatcaaattcagataagatacccaaatacgattgaaaaataatcatgcctaaagcctcaagtacaattaaatgtccattacttataagtactctttaaaattatctttacgaaattgtattttatcagtatcttccttgctttccatccttatatttccgtcctttgtattcaatgaaattgggtgccgacggtgtcggcagtatttccgacgccgtcagcagtatttccgacagcgtcagcagcattgccgagggcgtcggcaaccgatttcatcaaatagaaacgccaaagagataaacgttaaatctccgaggcatcctatacattatccatttaaataacgagaaaatcatgggaaaaccaagaagtggcatccaagtcagtatttataatacaccgggcaatgaacaatgcgggccaacatcctgcgcacgagtcatcaccagagataccaaacgcatgaacgatatatgtgagtatatttccgaatgctcatccgtcacctccgccgacataaaaggtgtattggaggcgcttacttcctatatcggcagggaattatcctatgggtacagcgtggaactggaaggattgggacatttctcgccatcggtaaaaagcaaagaagtaacggaccagaaaggaaatactaaatcaagcgctagcatacacggcgttaacttccgctgctctccccgactgaaggagatggtaaaaaagaacgcccccatcttggttaaacgggaaaatctgcccaaaacgggaatcgagggaaggaaggctaagatgttatcttatctagaaagaaactcatatataaatctcaccgattacgccggcttgaacaattgtacccgctaccgtgcgagcgaggatatcaagcaatttatcaaggataacgtaatagccagcgtaggatatcgaacacaccggatttatgtgctgcctgaaaaagaagacgggcaaaactaaaacttaagacgcagtggcacttccggactctacaaatacgtgacctaggaaagcgctagataaaccagataagtaacatgatatttttcttcaagaacttcaaggcttcgctgatttggttctcaacggtcttctcggaaatattgagttggaaggctatctctttatagcttttatgctccttccggcttagattaaagataacccggcgtctttccggcaattcctctatcaaatgatcaatatactcccccaagttataggcggtgatctcttcctctaaatcgtaagaggtatccatagcggacaagaccgtcattttataaaagtcctcgttcacgttcttccggtgatgattaaagatcaagttgcgggtgatgataaacagaagccccttgaagttatcatcctcccggatgaattccctcgactcccagaccttgataaacacctcttgtaccacatcctcggctacatcccgattattcaaataaagcccacagaaatgataaaccttttcccaatattgtttatacaacatcgaaaaagcctccctatctccttctttcaacgactttataatttgtctctcttccatttagcatcacatatcgtttcgcgaagataataaaatcatatactaataaaagttaatgacatcccagttctcccggacttctttgtactattaatatagcacgagaaataatggaagaacaaaacaaatatataagcgatttattaatccgatatgtaaatggactctatacacggaacgatatagagaccttgcggaagttagcctcatccataaccgagcgagcagaattagaaagcgaaatggaccgggtctggaacgaggcgcaagacttacctcaatccgattcccataatcatctgctttataagaaggaggcgcaagacctgttggataagacacgtaaaagagaaagaagaatctccctatccactttcatcaagtatgcggcgagcatagcgattatcgtttccatcggattcggagcgaaactatacctaaatcattcagcgaagcagcatacatctgccagcgaccatctcctaacggaaataagcgtcaatcatggcgaacataagcaagtcacccttcccgatggcacggtcgttcatctaaacgccggtaccgtcatgcgatacccaacggaatttacctctgacatccgtttggtagaaatggaaggagaagcttttttcaatgtcatgagagacgagggcaagcccttcatcgtccgtacccggcaagccgacgtaaaagtactcggaacctctttcaacgtaaaagcctatcaagaggatgagttgatggccgtcagcgttcggaccggaaaagttgaggtggatatgcccgaaagcgtaatgcgcctattaccgaacgagcagataatcgtgaataacacaaatggagagatttttaaaaagaacgaggacgcccaaaaagtaacggcttggctgcaaggcggcctttatttcaaccggacacctatcagtagcgttatacacgatttggagcggatgtataatcaagagatcgtactcgatccgaatgtcgtattcgacgattacatctatggcgagcacgacaataaaagtctggaagccgtactgaacgcaattcaatattcaaccggcatccgataccggaaagaagaaagtcggatcgtgttatataaaacgagtcattaaccttaaaatcgatttgcccatgaaagatacgacataagcttagccacataaaaaagggaaaccgacctctgaccttcgatctccctttatctttcccgatatgtacacccttggattggacccccttggagattacataaatcggactgtttttaaaagtgtataaaaacaacctttaaacatacaaaattatgaactttccaactattactaggaataattggatgtgttgttctattattttagtttttttagcgttaggctcccctgaacctctgcaagcgcaagaaaatcagaaagaaagaataacaattcaagtcaaaaaccaacccatacagaaagtctttgatgatttgtcgaagcagacaggattaaaatttttctatggagaagccatcgcgaaccggaacgtacaggttaacctaaagttcaaaaacgctcccgtcaacagcgtattgaacgagatcacccggcaagccaatctttattttaagcgggagaataacacgatagccgtcagtctcggaaacgcgggcaacgcctccgttccggtgacgcaagaccgaaaagtgaccggtatcattacagatgaacggggcgaaccgatcatcggagcgaatgtcgtggtaaaaggtacgtcaaatggtacagttaccgacctgaacggtcagtacagcatcgaggcgaacggtaaatcgatcctactcatatcctacatcggctatttatcggaagaagtggccgtaggcaacaacaaaaccctcaatatccagctaaaggaagacacccagaagcttgatgaggtagtcgtgatcggttacggaacacagaaacgaagcaatctttccggagcgatctcgaaaatatcctccgaggtaatcgactctaagccggttacaaatgtcctgtccgccttgcaaggagaaattcccggtatggtcgttcagcgaacatccggacaaccgggtaacgaggaattcgacttgaacgtgcgtggcgcctcctccacgaacggagggaataccccgctagtcttggtcgacggaatccccggggatatgaatatgatcaacccgcaggatatcgaggctatatcggtattgaaagatgcctcagcctccatatatggttcccgtgccgccggaggtgttgtattaatcacgactaagaaaggaaagagcggagcaccgaaacttacttacaacgggaacttggcgatcacgaaaatgaccggaatcatgaaagccccgacaaattatgagatggcgattatggataacgaggcgaacatacacaacggtgccgccccactctatacccaagagcttctggatcgcatcttagcgaacgatccgaaccctatcgaccatcccacccaacccggctggaagctctttttcacgaacacggactggatggacgagttgctgaccaatggcgtacaacatcgccataacctaacaatctccggtggaggcgagaagtctaactattacctatccgccggctacagcaaacaatttggcgtggtaaaatatgcagacgataataataccaaatacaatctgcgtatgaattatgattatcgattggcaaagtggctaaaattagagacaaaggtatctttggataaccagaaacgtacggacataggaagtaatggcgcttgggtgatcggcgaggcgatgtttgatatgccgaacttcccgatctataacgccaacggagagttcttcacgcaaggaggctggagcaacgcaatagcgctggccaaggaaagcgagaccgccacgttcaatacccgggagatgaacggtaactttagattgatcgccgatatcacggacggactcgtgtttaacgctcaagtgggcttaaactacaaaaacaagaataacgaggatatagcgaaagccatcccgctctatacatgggacggtgacatcaattattatacgggagcaggtagtcccgaacaatccgctgtagatcgtacgaccgaggaaaccatctatcaaaattatacggcttacttgaattataataagaacttcggactggatcatcatttagatgccatgttaggtatggcttatgaggcagaagaggtccgtatgttcatggcacgccgagataatttcatcacagacgaattatgggaactcaaccttggtggcaccggaaatatgaagaacgacgccaaagctgaacattgggcgacaagctcggctttcgcccgtattggatacagcttcaagaataagtatatcttggagacaaacttccgctacgatggttcctcccgcttcgccccgggtaaccgttggagaatgttccccggcgtatccgctagctggcgtatctctcaagaggaattcctaaagagctctaaggtattcaacgaattgaaactaagagcttcttacggacaaacaggtaatcaagaaggtattcgtctatacgattatatccagttgctaaaattcagggacgacggttggggaactaaattgacctatcctttcggcagcggttcacaaacacaagcgatggggctggatgtcttagccggcgtaaatcgcacatgggagatcttggagaatatcaacgcaggtattgatgccgctttcttagactcccgcttaggattctctttcgactacttcgtgaagatgaacaataatatgttgatccccgtaacttatcccagtatgctaggggcaactcccccggatacgaactcgggcaaattgcgtacgaatggcttcgagcttaccttaaactggacggacaaaatcggtaatgtcgaatattccgcacaattccaattgagcgacgctaagaacaagctcgtggaatacggaggctcggacacttatgagctaggcttgaacaagacgagagaaggatatcccatcaactcctatttcgcctatgtatatgatggcgtagtcaaggaccaagcggatctggacgcttacaagaagctggaaggcgtaccctctaatatcggtatcggcgatgccaaattcaaggatctgaacggcgatgggaaaatctccacttacggtgataaggaaggggacgacggcgacgctaagtatgtcggctcaaccactccccgatatacattcggattaaacttgggtgccaagtggaacaactttgatatcagcgtattcttccaaggagtcgctaaacgcaccttgttccgtgaaggtgagttctccatgccttggagcgactggtggagatatccgcctcagttctattacgggcaaacctggaatgaggatcgtcaagacgcatattatcctcgtctgacccacggcgatatcaggcattggaactaccaagcgtctacgatgcaaaagatcaacgccgcttacgtacgcctaaagaacatccagatcggatataccctgccgaaaagcttattgcagaagatcggtatcgagcggacccgtttttatgtaagcggacaagacttattcgagatacacggggtaaaaggcggttgggacccagagtctgacaccggaggtttcaactatccgttccaacgttactactcatttggtatcgacttgactttctaaggttttctatttaataaaacgaatattatgaaacgattcaatataattatcacgttatccgccaccttaggactattcagttgtgagctggataaaatgccaatggatcaagtgtcggacgctgtattctggcaaaagccggccgactttgaattggccgccaacgatttctattttgggctccaagaggtctcccaatatatagacatgaactcggatatcgcctttggttccggcacgaacgatgtcagcgacggttcctatctggccccggtcaactcggatgattgggacaacccatggaaatttgtccaatctacctcttatttgcttaagaaagcggaggaatccggtttgtcggacgaagagatcggacgttggaaagcagaagcgcatttcttccgtgcctacaactattggaaattggtgaaaacttatggaggagtacccaagatagacatcccgttaaatacctcctcggaggaactttacacacctcgttccagccaacaggagatcatcgattttattatcgaggacttggataaggccattcctctccttccgaagcaaagcggactgaccgctgaggaattaggacgtaccacgcaaggggcggcattagctctcaaggcccgtgcggccttgttcgaaggaacttggcaaaaataccacgggatggcggacgcaggcaaatacctcgacctagctatccaagcggcccaaaccattgtcgattccaaggagtatgaactatatcgcgagaaaggagaactcagttacaaatatcttcatatcctagaaggcgacgacagcaaggaagtcttgttggcaagacggtattacaaattgagagcgactcataactggacccgggaactattattaggtgccatggtaccgacaaagaaccttgcggacgtatacctttgtaccgatggtttacctatcgataaatccaagttgttcaaaggattccaaacccagacaagcgaatttgagaaccgggattcccggatggcgcaaacgtttgtcgtacccggtagcgagatattctcggaagggggcggatgggcaaccgtagagccgggattcatcggtaacaattctacccggaccggatacatgatccgcaagtttatggatgaaacgcttgatgccgtacaattcattggggaatacgatttcaaggaattccgttacggagaggtcctattaatcttggccgaggctttatacgagaagaacggacagatcacggacgagcaattagacctgaccattaatgacctgcgaaaccgggcgaatatgcctcgcttgaccaatgcgtttgtagctacgaacggactgaatatgcaggaagagatccggcgtgagagaaccgtggaactggcattcgaaggatatcgccgggacgacctacgtcgttggggcacggcggaaacggttcttccccttgcgatccgtggcgtgaaattcgtgggtacggagtatcaacagaaattcccggagttggtgatcgggcaggatatacaggtggatagcgatggctttatcatcgcccaacccgcatccgcccgcaagttccagacaccgaagcattggctgtcaccgatacctttgcaacaggtacaattgtcgaaaggaaccttggaacagaatccgggctggtaagggtttttccaagaataagcgactatatatatgagggtaggccctacctatacgagaaggtagggcctacctatctgggaggggaatcccatttaaatatgaattatcttaaatttttatagcatgaagaaatactttttagcagtagctagtttttttatttattctcatatcagtctaggccaagtgtatccggggcagatggattccacgtttgtccctgtacggagtcatcactatgacccggagttaacatttgatttttgcgtgaatgaacccgcttggagcaatcaggcgggtatccattccgccttcggatcgaccgaccgactttatttccggaaggaagtacccgtaaaccatgacaacgatttatcatcttcctactctacgaccgtttggaggggggaaagagcgaatgcccaaatattggtatggtcgtcagaagcgttggaacaagtacgtgtctctacgcaggacttgaggagcgccgagggaaacatcatcccaaaagaccggattaccttcgagttggtgcgttacgtattgtccaattatccgtatgccgagaaaaaagccatctgcggggaatctccctacaaatccggcttcttgatgccagaccgtttcgagacgctggaccgcttcgatctcccttcccaaaccacccgtccggtatggatgatggtggatgtgccgagaggaaccgctcccggcacgtataaaggacaggtggaggtgcgggcgaaaggcaaggctcctcaactattgaatctggaaatcgtggtgcaaaaccagttgctcccctatccgaaagactggaaataccgtctggacctatggcagaacccgtgggccgtggcatggtacaatcacgtggaaccgtggtcaccagaacataaaatgcttcttaagcagcatttgaagcattatgccgacgcaggtggtacctacatcacgacttatggagtacattctccttggtccgataactcttatatgatcgaggggggcatgatcgagtggatcaagaaagcagacggcacatgggccttcgactacaaaatcttcgacgagtacgtagaattagcgatggaatgtggcatcgacgaggcaatcaccctctataccccgattccttggggattccgtcaccgctataaggacgaggctacgggcgattattcttatatcaactgggcgccaagctcgaaggaattcaagaagatgtggaatatcttcctcacggatttcaagttccatctggaagctaaaagctggttggacatcacctatatcggaatcaacgagaatccgatggaagagaccttagcggctatcaatgtcgtgcgtaaccatgataaatgctggaagatcacttacgccggcaattggcataaggaattggacggactgctggacgattattctttcctttacggagaggaacctaccatcgccgagcaaaaggcacgggccgccaccggacgcacgtccaccgtatacgtatgctgtaacccgccgatcccgaacaacttcgtgttctcacctcctatcgagggacgttggatcagttggtatgtaatggcgtatggttatgacggcttcttgcgatgggcttacgacgcttggccggaagatgccgatcgcgacgcacgtcatggctcttgggcagcaggcgattgctacatggtatatccgggaggcaaaagttgcatccgcttcgagaaaatgagagaaggtatcgtggatttcgagaaggtccgtatcttacgggaactgaccgcccaatcgggtaacgctcaagctcaaggcttattgaagcagctagaccaacatttgtctatcttcccgaaagagaaagagttcgatgagaacaagatctcggcgaatgtacgtaagggtaacctcatcatccgtcaactgtccgatcttttggcgaaataatgggcttatatagcaggaaagacatgaaagcatatcgtttaatcctatcactcatggcaagcgtagccgcagggccggccttctcgcagacaacaggtgttgtttgcgaggagttcgaccagatacagctgacgcacgtattgacgcccaccggcccgctaccgaccgccttggacccgaatggcgtatacccctatatgagttatagcgagacctcaaatcgtccggtgcctaaaaggtaccggatgatctcgctagagaacgagaaagtcaaggctatcatctgccccgatctttgcgggaaagtaatatccctcactcacaaggagagcggcaaggaggtcttgtacaggccagacgtaatcaaatacacacggatattaccccgtttctatttcgtggccggggggatcgaggtcagtttcccgatctcccactctcccacgcaaaatgagccggtgctttatcagatcgatcatacgggagaccgcacatatgtaacatgcggagaacgggaatctcattacggtatgcaatggtctgtagaatattccttaggagataaagacgaatgccttacccaaagggttgtttactacaacccgggaaagctagcctatccatggatgtcatggtccaacgccgcccttccttgcgcaccggatacccaatacgatttcccgaacgggaccgtattatcccatgcctccacgttggacacgatcgactggaaaaccgaaggaacccatcatgaacgggatatcaaagagatgaccggctacttctggaaaacgaaagacgtgaatgctttcggggcctacactccctccttgggcagcgggctctatcatatcgccggcgaatccagtacgcccggtatcaagctatggagttatggcgtagccggcgacaaggaatggtctatgctcagtacccccgaccggcagccttacgtagaaatccaaggtggcccgatcagcgaccaatctatcaagctcgaattgcgtcccggcgagaaaaagaatcacgtagaatattggataccgacagatcatcctttggatatctattccttaaaggttccggcattaaggcttcgcccgatcgatcgcatcccgctattcgactgggcccggaagaatgaatcttccatctggatcgccttagccgatgcctataagaataagtccacgcttcccgccgccccctatccggaagacgggcagtgggctccatccggcatggaagatctggacgatgcttttcgttgggcgatccaaatatctccccggccggaacgggattattggcaattccactatgggacttggttggctggaagagaacgtgtagaggaggcgatcgaacaactatccattccggatatcgatctggcgaaagctttattggcaaggctatatgttcgtcggcaggcgtgggaaaaggcgagagatacttacgccgctatccccgagacctcgtggttgaacctacatccccagttggttatcgagcgggataaagtattaaagaagtttggaacagaggctttaccggaacgggaaaaatggttggataagataaacgcgtcctctgatgaatgggtggtcgagcgaaaggtacagctactgattgataagaagcaatatcaagaagccaaggatttattactatccacccatttccagaaagtgcatcaaacttacacccgtacgggactttgggaacagatcaacgaaggcttgggcctctccccgcaacctgtaccggaacaactcggcgaggatcgcttagcccggttcggtgcctatcgggaatatgaataaagggaggtgtgtttttagagcagtagcttcatataagtctccgcatatttagccagaaacgcccggatcactttcaaggccgtagagatatgttgttgtaccgtatataccgagatacccaaactgtcggctatctccttatgggatttcatatctttacggctcatatcaaaaacccttttttgttgtggggtcaacgtttcaagcgccttatccaacaatgcgtttaaatccgtatccaataccgagtcctccgtctcgttcgtgctatccaatgaggcggaccgtatcttatccctcagctccaactcacgatccagtcccgccaacaggtttaagatccgatttttcacgatcgtatacacatacgggccaaaaggtacattcgggttcaagaaacggcgattctgccaaatagaggcgaaagcatcctgaaaaacatcttccgccatatcccgggatttaagaaatttcaaggaaaaccacatcaagcggtccttatacagggcatataattcacaaaaggccgactcgtccccttctagcaagtccgccacaagccttctttctttctctgaatcaatgtctgccattcgacttattctcccacttcgattacataggttcaaatgtatgcaaaattcccaaaggtaaaaacaaattgaaccaaaatcagcaactccatcatacagctttataaactcacgataacaaacatctttgctcattcggaaataatcatgtatttttgtctgttcatttaagaaaggatgatgtattgatgaaagtttgtatcgccgaaaagccgagtgtggcccgggaaatcgcggaagtattaggggcaacccaacgaatgaatgggtatatcgaaggaaacggatatcaggtaacttggacattcgggcatttgtgtaccctgaaagaaccgcatgaatacgcggagaactggaaacgctggagtctggggtcactacctatgatccctccccggttcggtatcaaactaatcgagaatcctacgtatgagcaacaattcaaggtaatcgagagcctgatgcaaaatgccgagatggtcattaactgcggtgatgccggccaagagggagagctgatccaacgctgggtcatgcaaaaggcaggttgtaaatgcccggtctaccgcctttggatctcctcgcttacggaggaggcgatccgggaaggtttccaaaaactcaaagaacagacggaattcaataagttatatgaggccgggctatcccgtgccatcggcgactggttgctggggatgaacgccacccgcctttataccttgcgctacggacagaaccggcaggtattatcgatcggccgtgtgcaaaccccaacgctcgccttgatcgtaaaccggcaagccgagatcgacaatttcaagccggaaccctattgggaattaaagaccatttacaggaatacgactttctccgccacgaaaggtaagttcacgaagaaagaggaaggcgaggcttttctggagaaggtaaaggaacaggattttactgttaccagtatcaccgagaagaaagggaaggaattcgccccccgcctattcgacttgacctcgttgcaggtggaatgtaacaagaaattcgcttttacggcagacgatacgcttaagctgatccaatcgctctacgagaagaaggtgacaacctacccgcgtgtggacacgactttccttagtgatgatatctatccgaaagttcccaataccttgaaagggttggtggattatacggagcttaccgctcctttgatgaatcagaaattgccgaagagcaagaaggtgttcgataactcgaaggttaccgatcaccatgcgatcatccctaccggagtccccgcccgcaatcttacggatacggaacggaaggtgtacgatttggtagcccgtcgttttatcgccgccttttatccggattgcgagatatcgaccactacggtcttgggtcaagtggataaggtggaattcaaggtaaccggaaagcaaatcctcaaaccgggttggcgtgtcgtattcggagccgagcagaaagatccggaggctgaacctaccgaggaagaaggcgtattacccgatttcgtgaaaggagaaagcggcccgcataaaccgatcttgaaagagacttggacccagcctccgaaaccttatacagaagctactttattgcgggcgatggaaaccgccggtaaattagtggataatgacgagctgcgggatgccttaaaggaaaacggcatcggccgtccttctacccgtgcggcgatcatcgagactttatttaagcgtaattatatacgaaaggaacgtaagaatctttatcccaccgctaccggcgcggaattgatcggcacgatccatgaggaactgctgaaaagcgcagagttgacggggctttgggaaaagaaactacgccagattgaacgagggacttatgaggcccgtacttttctggatgagttgaagcagatggtaaacgaggtcgtcataaacgtcctttccgaccaaacccggcgaacgattacgattgaggatacgtctaaagcagctaaagaaactcccaaagacgaacccaaggagaaaaaggaaaagaaacctcgtaagcctcgtgccaagaaagagaaagcagaggctactcccgaattggagcttccatcaacggataagcccgtttgccccatctgtcacaaaggctctatcctccggggcaaaaccgcttatggctgctctgaatacaagaatggatgtacgttccgcttggattacgctacgtatggaaataatttaacggatgaggagttaggtacggttatcagtaaattaaagtctatttaaaatatgagaacagaatggtttcctctggtaaacgaggagggtgagacgatcggaaaggctactcgcaaggaatgtcatagcggaagtaagttgctacatcccgtaatccatttacatatctttaataaggatggagatctatatctccaaaaacgttccatgaacaaggatatacaaccgggaaaatgggacacggccgtaggtgggcatattgattatggagaaagcgtggaagaggccctgcgccgtgaggttcgtgaggaattgggcattaccgatttcacgcctgtcttcatcaaacgttatatattcgagtcttccatagagaaggaattggtaaacagcttccggaccacttacgatggccccatcacccccgatcccgaggaactggacggaggacgtttctggccgatcgaggagatcaaagagaatctggggaaaggcgcattcaccccgaatttcgaaaaggaattcaccgctattttcctataggataaaaacgctacacttcagctagaatagttattcaagagcctgttcattcttcgtaagatactgttacattccacaaaccacggcgtgaactgtacagaccacgacgtgaattatacaaaccatgctgtggtctgtacgattcacgccgtggtttgtggaatgtaactatatatgattatctttatatatagtaaataagatgttttgtcctatagtaatcgacctattatattatagctgtaaccccatatgtatcttacctcgaaacctaacaatctttgcctaaagcactaatacctctaccttaaatctaatgtttgttcagaccttaaaactaatcttatatattaatgtgtggtttatacatatcttgcgctgtcaaaccgcattcctttttcatacggatacaataatcgagcgttcctacctccggcgtgatattgttggaaccgaacgtgaactttacacccgcggctttcgctttctgaatgatcgctttattcggaatatgataaagctcgtttatctccaaagcctttccgctttttgccaaggcattcacgaaacggtcgatacgctcttctgtccaaaacatatcatatcggtcactcatcgcatcgggaaggaaacaggaattcacgtacatatcaaccggctcttccaagacagaacagatacggtccaacatcatatccatatatgcttgctcatcatcgataatcacttccttgtttacccataggtgcgtacgccgccccttatgatccagaaacgtcatggcatcggtaaacacatagtcgaagctgttgcgggccgcctccgaaaaggtggttacccactcacgtccttccgcttgcatagccaagataaagggttgggtacgcatggtatccagataattatacaactccgtatcgttcgtgatcgagaagccgatgccacaattgatagccaagccataattaacacccgtctggcgtgactgccgtgcggctacttccttcgtcaatccaccgtttaagtgaacatgataatcaagcacggggaagtcctcttgatgcaaacgaataatctcgtccgtctgctcatccacggcattcgcccattgagtgggaatgtctattcctttcgcactgaacgcctctaacgagatattcttaaactgaagatttccacgtcccgtacccaccagcgagatagtaccttgggataacaatgctttagcgttctccttcaaacggaaaggtttggaaggctctatatattctacgacagtctcaccattaatccgcacccggataagccgtccttctacccggatattcatcttgaaccattcgttctctttcacgaaactcttcgtcaggttccggactgacaccaagctacccgtcatccgccaccaaaccggatcttcccgatcgttgttcaaggcgatacggtatcctttacgatccgtagcgtctgtatggataccaatataacctttgccaccggtcgtggtacgtacctccatatctaactcgaagttcgtatagcctttgccatcgttcaacaaagcacgggcgttggaaccggccaacgtaaggatatcattttgtatgaccacgacgccggatgtcttccatgcgttgtgatcgaccgtatcgaatacgttctctttcgtaaatcccgtgaacaccaaacaggcgatcacggcggcaatcattaatttaatcttcatggcatctctttttaaaagttatgccgcaaatgtatccgggaataagaagcaaaaagaagattgatataaaaatgtagacagtatgatccgctatcctattaaatacaaatcagttaataaatatcaccatcctaaaaaatgtagattgattataacggattccggttaatcccgatcctcatcacccaaccttcaaactcatcacgaggcactaacgccttattacgtaccttggtccggtagttatagatcgtactcaacgagcaacgaagaaaagcggctatccttacgctgtccgtaacccccaaccgcatcaaggcgaatatacgaagttccttattcaacagatcctccgatttcaagacgatacgttcctcgggctgcaacaaagcgttgaagtccctgacaaacgtaggatataatccaagaaagattcgatcgaagttaacataaagcgcttccacctcattctccaccatacgggtcgaacggagcatcttgaataactcgtccaactgtttattcatcgcctttttctgtagcgatttctggtaatcctccagtttattaatataggtggagcagagatcgaggaaatgagcgatgtattcctctttgatatggtttgactccgatagctgtatatttcgctcttgcaataaattattcgtctcgcttatctctccattcaactttaccaaacaggcattagtattaaccaactcttctcgtatcgctgagatcttccgcatctgcctatacacataggcaagagaaaggatcagaaagagcgtcaataggctgatcaacaagaaataagtcatcaattgccttttgccttgagcttcctgtgtctgataggaagcattaatgataggatagaatttagagatctcattcatgcggaactgtatattgcaagtaacggcaccttctatagctagctgcgcatatttaagggcattggatagatcaccactttcataataattcaacgccagcttttggatagaaccactatccaagaaggccctcttgatatcggcgataaccgacaaggtataatagtctcgggcgagatcgatacgcccatccatatcataaacatctcccagcagataagtgatcatcgcgaaattcgggttataccgctcctctttctccaataaagggatgagcaccttctccgcagacctcgcctgtccgtgagccagatatttctgcgccagatttatcttataccgataagaggccgtatctaagacagacaataacgaatccttgtataaatcaagttgtttcctatattcaaaagaatccagattcgtactgtaataagagaaaaacgaataataagcctcatagaaatcctgtttctgctctttagacagcaattcacggtctatgcttcgcaacagactttccgactcacggtacatcccggagaaagcataaagcgtagccagtcgtaagcgggaagtatagatgcgtgccgtatccttcataaatgacgctatctccatattccgctttatgtaatagatggccgagtcttgttgtattttcttgaattcctcgtataattggtggttgatctcatattcctgccacaacgatatcttgctcaagagaaacatgtcctttagctgcgtgatccgttgctcccgttgctgcagataaaaagatctattcaaaacagcttcatccaactccttggccaacgtgtcccctctcagccctccccatgcgaagacctgaaccatcccgacaattagaaataagattacctttattagtttattcattacacgaactgagaattatccaaaagaaaagggttcagtcaaatcaacagagtataaatagcttacctcggctgaagactgaacccaatattttaaaacgccccgaaagggtgttatttacacatctcgttgatgatctgtattaattgaccgcctaattcctcggcttcctccatcgtatgggcctcagagtagatacggatgatcggttccgtattgcttttacgcaaatgaacccatttatccgggaaatcgatctttacgccgtcgatatccgtaatatcatattgagagaacttctcttttactttcgctaagatagcgtccacgtcgatctccggcgttaactgaactttttgcttggagatgaaatacggaggataggaagccttcaactcgctcgtcttcatcttcttctttgccagatgagtcaggaacaaggcgatacctaccaaagcgtcgcgtccgtaatggctggccggatagatcactccaccgttgccctcaccaccgatcacggcattcgtagccttcatcttggtaaccacatttacctcgcctacagcggcggcattatattcgcagccatgagcacgggtaacgtcgcgaagcgcacggcttgagctcaggttacttaccgtattacccggtgtatgacttaatacgtagtcactgacagcgaccaaggtgtattcctcgttgaacatctcgccattctcgcagataatcgccaaacggtctacgtccggatctactacgaaaccgacatccgctttcgcatgtcccatcaaatcggagatctctgtcaagttttccggaatgggttccggattatgagagaagtttccatgaggagcgcaatgcagcttgaagatttccttcacacccaacgcatataataaatccgggatcacgataccgcctacggagttcacgcaatcgatagctacccggaagttagcggccttaatagcctccacatccacgagatccagattcaagacgctctcgatatgtttttgcttataagtcgcattcggaattaccttgcccaaatgatccacgtcggcgaactcgaagtcctcggcggcagctatgcgtaatacctcagccccctcagcggcattcaagaactcacctttctcattcaaaagcttcaaggcattccattgcttcgggttatgactggcggtaaggataatacctccgcaagccccttccatagctacggccaattcggtagtaggagtcgtggccagatcgatatccaccacatcaaatcccataccggtaagtgttcccagaacgacttgttttaccatcggaccggagatacgtgcgtcacgccctacaacgatcttattggtctccacttttgtgttttttcggatgaatgtagcataagcggctacaaacttaacaatagctaacggattcaatccgtcttccgggctaccgcctattgtaccgcgaataccggaaatagatttaattagtgtcataagttttcttcaaatatatattctagaatttcgtaataagcaggctcaccgtttgattggtcgttataagtacctcgcttaaacgggactataagttttaccttagcccgatctccgacgtactttaaaggctcttgcaatccttcactcactaaatacggattagcttgactggcataatctccatatgtaaactcccaaggaccagttccgttactatgcggaccatagttctggatgtaataaggagtactatttatataagcagaatccatcggataggaaacattacatctgtatagaatctttgtcttgtactgaacagctctttggcttgtacccttttcaattatattcagatatgtaccattctccaattcaacaaactgattttccttaaacacactatcctccggaaaatctttcagaatctcaaaatcattctcatcaatcaagcgattgattgcctttttctcatctttcaacatatccgtgtacgactttgtcttgctacaagagatagcgactaatgtggcacacagaatcaacaggatattaaaacctttcttcatttgttagtctttaattgaatgaatcgcaaatgtaaataatcttcgtcaaaccttacgcatgtttgcctaaatcttctgatttattaggattaaattcctgtaaacctttctcaaacacggctacggcctcagataaagagccatagaactcacctccggacgcatttttatgtccacccccgttgaaataagtagaggcaaactggttgcaagggaaatcgcccacagagcgaagcgatacctttatataatcgctgtcctcacgaataaagacactaaagcttacgttctctatgcttagcggcaagttcacgaagccttccgtatctcctgcctggtactgaaaacgatccagttcctctttcgataacgtgataagagccgcctgttgttccggataaaccctcatcttctcatacaacacatatcccatcatacgtaaacggcactcggaatagacctgattcaccttacgatagatcaaatccttatcaatccccttcttgatcaattcgctgacgatcgtataaatctccggtttattcgaattataggtgaacgatcccgtatccgtcatcatacccgtatagatacaagcggcggcatcccgattcaataaatcgaacatccccatacgacaaataaaacggaagatcatctcactggtagaagacatctccggatacgacatcgtcacacgacaaaaatccgcggggttcagatgatgatcaatcatcaccttgcggccttccgaggcgatcaccgccggagccagtttctcaatacgtttgggttcattgaaatcgaggcagaaaataacatccgcttccttgatcaatttctcggcgaaatccggatatttctcatgtatcacgacatccttagcgcccggcatccatctataaaaagagggaaatgcattcggtaccactaccgctacattatccttaccgtaagcggataggaaatgatataaaccaagggatgaacctaatgcgtcgccgtctggtgagacatgcgtcacgataacaaaactctcgcctttctctacgtattttttggctttctgaatcttctcttcttgaatgattttagtgatcatataatctttttgttttcacccccaaaggtacgacttttttagtttccggctatcaaaaaaagttcaataaggatctttactgatattattaacaaaagggttaaggcggctaacaaaacttttggttcccgtatcttcatatatatcaagcataaaacaagaaacccataacctcctagcatctcaaagaagctaaaacgacccgtaatcgtcgcataaggcataacgctaaacacgtccactacccttaccatgccatgaaccagcccttctacgatcttctgtatccagtcatatccatagaaatccaccggatagcctaaccacaaaaaggcaaaaggaatcaaaaacatagccaagagagtgaccggtagattcgtaaacaagaaaactgtcgaaaattgtccaaaataataaaaacagagcaaagcagtacctatctgtgcagcaatagacaccgtaatccattcccaaggcatggccaacaaaggatttctcaccactatccattccttgaaacgaggcactaggaataaaataaaaaacacagccaaatagcttaactgaaaaccgacatcaaacagataatacggattataggccagcatacagaaagcggcggcggccaatgtattatatccatccgtaacacgcctaagcacccttcctgttaaatataaagacagcatcaaggcggcccgtaccgccgagggcgctaatcctgtgataaagacaaacccccaaagacttcccaccagaatgatataacgaacccaacgtcctatcccccatcttggcataaacgagcaaaagaaagataagaatccacaaatcacggcaacatgaaaaccgctcaccgctaatatatgagacacgcccgccaaagagaagcgccttttcgtttcccgactcatcgctttcttatatcccaatgtcaatgtagccaaaatagatttctcctcatcagataaacgcaaacgatcaaatgtatttaccaaagaatattgagccttggtagccaataaatctaaagaagaagcaggctcatttacaagcgctatacgccggtcactataccaacagacctcaaccgccaaacatacaatcaaaacggagactatagctccccatatccaacgggaatcgtattgcaactcagcatgcccttgcccccacgagaaccccaaaaaaagaaaaaccaaagcagataaaacccctaaaacatataggagcgaagaggcaggtaaaaacgcatagcataaaattccggttatccataaaaaaagcggccgtacaaaaggccgcttttgtatttcctcaatcatgatagttaggttttgtgatatattaatgtgttctacaaagctttcaagtctttaattgtttgtatcggatctggagatttgaatacgaagttaccggcgactaacacattggcaccggcgtcaaccaagcgcttccccgtctctaaattcaccccgccatctacctcgatcaaagtactcaatcccttccggtctatcatttctcgtaaacgagccaccttatctacggaatgctcaatgaaacgttgaccaccaaatcccggattcacggacatcaataaaaccatgtccacatcttggataatatcttccaataagcatatgggcgtatgcggattcaaggtgacacccgctttcatgcccgtttccttaatagccgctaccgtccgatgcaaatgggaacatgcctcataatgcacgttcatcatataggctcccgtagccgccacttcggggataaacttctggggctccacgatcatcaagtgcacatccatcggcttctggcatataggctttaatgcgttaagtaccgggaaaccaaacgagatattcggcacgaataccccatccataatatccagatgcaaccaatcggcgtcacttttatttatcatctccatctccttccgcaaatccagaaaattagcggaaagcagggaaggtgctatcaaatgcttcataatcttgtcttttgtttttacaaaagtacacaaaaaaagaaagagaacctaataatatagattctctttccgtaattcttagttcaacacatacccgcagagctccggacgtacagccggttccgcttgataagccctcgcaaactgtttcaagaaatccatcgtttgcttccgaggcgaacttttcgcctccggggcacttttcacttttttctccaaatcatccatgcattgcgtagaaagcttcctcataggcacctctatttttatcttgtttgctaataaaacgtagggacctaagacttattgcatggaaagaaaattattttacaccatagatagctcgatacggttctcatcggccatacgacgcatattcaagatagcgtaacgcatacgccctaaggccgtattgatgctaacccccgtgatatcggcgatttccttaaaactaaggtcttgatagtaacgcatctccaacacttcacgctggttatccggcaaatgctttaccaatttcttcacgtcagacaatacttgatggcgcacgatattatcctctatcgtaccatcgcaaagcttgatattattaaataagtcgatttctacctcatcattcgagatcgtgttttcgcaacgttcttgacggaaattatcgataatcaagttatgggcaatacgagtaatccatgccttaaacttgccgttctcagtatagcgaccttgttttatagtcatgataaccttcacgaaggtctcttgaaagatatcctccgtaagctctttgttacgtactatgaaataaatgtaagaatgaatgctacttttgtatcgatttaataaaatatcgaaagcggcattattaccttctgcataaaggacaaccaattcctcgtcggtcatcatttttaaagtcttcattactttcacatttttagtttattcgagtaatgtttatgctataggcgatggggtttaactgttatacaatgttatttatggaagcaaaagaacgaaaaatattttaaaccaacaaacattttatttcaaattataaaaagaatgtcccctgcccgcacctttaacatacgaacaggggactttactgatctaaaatatatgtatattagaacttgtatcccaatgtcaaagctacacgagtcgtgtttgttttcatcgtggcgggttgggcttcgaggaatggtttcggatcatctcccgcaaacatattagagaacgcataaacatcttccttatgcgtacggaatacacaagccaagtccgtatagaagttcggggtgaagcgataaccgatacctaccgtataattcatgacccctttatcgatcgtataattaggaatcgtaccaaccgtaaagacctctttctctccattcttcagtttatccttgatcggactatcgctgtaggcgacacctgctcttacggcaaattgaggagtaacctttacctccgcacctacacggatcgtattcattgacttgaaattatccgttatatcttggttagtatacacgttactgctaccatccgtttgatacatacgcatattcttataattcatcaactcgtaatcaacgcttatcaaagcggtcgtacccaagatagcggcggcactaaagatccatttatccggagaacggaattcatagtcataataagcattattaggggtagcggcatctagtttacgctctttcatctcccctttatccataaaggtcagataagaaccggcctcaccataataacgatctgtcatcttataccacgtaggtgaattataagccacacccaagcgaagaaaatcggcgggacggacgatagcacccacattaaatgaatacccggtaccatccgtatccaagtaattatctaagtataaattattgccgttcgtaaattcctcatcatacgatgactgatatcgatagttcagatccgtaatcgcaaccgtagcgccaagcatcacaagttccgatatatttataccgaaagccaaatcatattgatccacggaacctcgctctgaaacttttaattgacctccttgcaataaatatggactccattgcccatccgcattattatctccgaacgcactataatactctttatcattatcgttatatgaatccatataaccggcattgtatcctagaatagatagccaatcacccaagtcttgattgttataaggattatagtccttatcctcccctaacagtccgctaggcattcctgccgcacgcatggccacataatcagaaagagaagtattcaaatcacctcctgtagccatcgtatagttccggctataattcttcaagcgattataagagaaaccaacgttccagctcacgataccctcatcattcgctgtcgggaaatatcctacgtaagcgatattatcgaaactcaccttcgtacggctgttatccaccttcgaaccaagccaatcggtcttcgccgaggccgaagacaaactcaatgtcgtaaccacctccgagcttttataaatcgccaagcctgccgggttcgtattcatagcggaaatatcaccacctaacgcaccaaaagcaccacccattcctaaataacgagccgtaccattcaactccgtctgggaatacttaaaggcatccaactgtgactgcgaaaaagcggtgccgccacacagggcaagcaccgacattataattcctatccttttcatcgtatctctaattttatcaacctaacacttttacctgcgaccaccaccggcacggccacctccgccaccaacagagcctccactagaacgacctccaccgaagctaccggaagaagaacctaccgaactactacgagaaggagaggaacttctaaattgactggaagaagagcgactatttgagaaatcgctactgctcctagaagaggaacgtgttaccggagctgaatattgacgtccggaagaagatgcggctccagaactacttctggaaatccttgttctcgccgagctattacgtatgcccgagctacttcttgtcgttgccgaatttctaacagaagaagaggaacgacgtcccgcaccagaggatatagcagattccctacgggtagatcccgcacgtccattgctcaatgaacttgaagacgaaggtcttgtagtcgatcctgaatttctcaaggaagaagagccactgctccgcccacctgtataaccggaacctctgccactcgcataagagcgattatctcgataagaggaacgtccgtttgaataatgtctacttggagtcgagtagtaaccgggatagtaatggtgatgatgtccccaatggccaccccaatagcctccaccccagccccaagacgggccataccatggatcgtaccacggactataatagccggcataaaagcctccccagccccagccgaatccccaagacgggccgtagaagcgagatgaataagtccaccaagggctatagctatagaaccaaggatcgtaccaacctgtataccaaggcgagccccagccgttgccgacattgatattaaaattcacgttcgcgctaccgttcgaataatccgtatcatagccgtaaccataatatccgtcactcagatacaaatcgacttgatccgctccggcgatcgtaatcttactcggcgaatgataacgaatgatacgttccgtatattcagtatccgaacgacgctcggaagaagactcattctcatcgctatcctcatagataacggaatcatcctcacgataaggctcctctacctcgactgatgtataacgacggttatattcatccacatcccggctgtctgaagaagctgggctcttggctgtagcgaccagggccctagactcctgtttcggctgaacaacctttttctcttcaacctgttctttctttttcttgtttttggaagagaaatacacatcatcaaagaactcctcctgagccgcggcactaaacgcgatcagaagcatcatcactaaagatgttaatttcatgggtttcatatttgtttctcctctacattaaataaatatttttctcttttcatgtttgacacccttttatgcaaagggtttaaacgctttttagttttataacaataaactcaatgcaatgtatgtacaaatataatcggttcacgctaatgtcccaagatttacatatactttaacttataaaactcacacattcattgttatctataaaagaagatgcaaagttggcgtaaacgctgcaatctccgcaaattcttattatttttgtttcaaattataacgaaaaaattacgcatatggtattagcctcgacaatagatttcacattgcccttagcggacccggtattaaaatttctcttgattcttttaattatcctggccgctccccttttattaaacaagctgagaatccctcacctgcttggactgatcattgccggcgcaattatcggaccgcacggctttaatctcgtattacgggatagcagcattatcttgtccgggacggcgggattgctttatatcatgtttctcgccggattggaaatcgacatggcggattttaagagaaatagtacgaaaagcctagcattcggcatgtacacattcctcattccgatgatcctaggaacggttgtcggaatatgggtcctgcgattcaacgtattgacctccgttttactcgccagtatgttcgcctcccatacattgatcgcctatccgattatcagcaaactgggtatcagcaaaaacaaagctgtcagtatcaccgtaggaggaacgatgatcactgataccttggcattgctcgtcctaacgatcattgtcggcatggccaccggacaggtcaacgatatgttttggattcgtctgggggtttccatcttgatatttgcgttaatcgtattattcggtttccctttcattgggcgttggttctttaagcatgtacacgataatatatcacagtatatattcgtgctggtgatggtatttctgggatctttcctagctcaggtagcgggtatggaggcgatcatcggggcgttcttatccggactagccctaaatcgccttatcccgcaaagctcacccttgatgaatcgtgtcgagttcgtaggaaatgccatattcatcccattcttcttgttgggcgtaggtatgttaatagattatcgtacgttctttaccagtttcgagaccattaaagtagggcttatcatgattatcgtagctacggccgccaaatacatagccgcttggatgacccaaaagactttccatctgtccacagatcagcgaagcgttattttcggcttaagtaacgcacaagccgccgctacattggccgccgtgatggtcggatataacgtaatcaccggaacagacgctaatggggaaccaatccggttattaaatgagagcgtgttgaacggtacgatcctgatgatacttgtcacttgtaccatcgcctctttcgccgcccaaaaaggcgctcataacatagcggcccaagatatatccgataaggaggaaaacaaaaaagaatcagagcatatcttgataccggtcagcaatgaagagaccgtggaagagctggtcaacctcagcttggcgatcaaatctccccaaaacaagaacggcttgtttgccctaaaagtgatagataaccatcattcagacgagaaagcgttaaaacaatcccgcagggttctacagaccgcagtcaatacggctgccgccacggatacccggatgaaagatttattaagatatgacttaagcgtatcgaatgctatcgccagcgtggtaaaagagcgggagatcacagatctggtagtgggattgcacaaggaaaaagatataccggcggccttcctaggccatatcgtggaaagtgtattggcggaaagtagtgtaagtacattcatatacaagcccgcacaacccatctctaccgttagacggcatctgatcatcatcccggaattggccgaaaaagaaatcggtttcaaccaaatcatcttccggttacgaaacgtgacccagaacacaggtgcagcgacagtcttttacggttcggaagcgaccttgaatgccttaaagaaattattagccaagaaaagcggagaagccagttatatcgaattcaacgactgggatgacttcctgatcgttttccgggatataaaaccggacgacacgatgtggattatccttagccgcaaggaaggactttcctacgctcccgccatggcccgtatccccaagtacctcaacaaatacttccaggcaaacagtttcgtattggcatatcccgtgcaggctggcatgaacgagggtactcgctatctgacttaaccattacggaaccagcctctcacgccaagactttcgaggtgagtacggcattttccgcttggcgtatcccagacggaggatcaaggctggaatctcgttggtgaaagacaagtctttcgccagcaaaccggaaagatcacgcacctcacaaggctggttcaaaaaggcgaaagcgatattcttttccgtagctctcaaaagaaaacgttgcaaactccggcctagcgcaaaccattccggtagcgtatttatccgtaaggcgaacaaggctaaatgagaagaagagtccagcttcttcttgtctcccctattttgtatgccggctttcaagacacttcccatgattgtctctgagataagacggggaaggttcggcgccccgaacaccgcataactcaggccgtccgatgtagctcgtacatgattcttattaaaacgcatccatgatttcagctctcgcttaaacagacgatcgttcatttgccggttattccccgcaaatatataagaagaaagcgtatcgaactcccactctcctttcgaccacaaatgcagactgatattttcctccaaaggcgtattcctcaaatagctcagttgatccgatggaatcatttccccggaatatatgcctcgattcgtctgtctcaccgaaatttcctcgataagcccactcgtctccttaatcatcgatgcctccgacaagagtacggtgatctcccccgatcctgaaaaaaacggtagcggagtatatccttttgcctcagccgcaatgcaaagattctcggtggcgcatcctaagctaataaataactcacggttatccggatctacggccggaagggacttactcatatccggaagaatctgtatcctatccttttgcacacgaaacaaccaaggttgggtattatgccccgatggggctttcacggcttgttccatcatatagataaaatccggccgtatatcacttatccgcaatgatcctgtttccatattattatacactttctcattctagcgatgcccgctacctctttccgtttgtgcccggacaaacgcctcaaaaacaaaaaatcccgtaaagctttcgccttacaggactctctgcggaaagacagggattcgaaccccgggaacctctcagttcaacggttttcaagaccgccgcaatcgaccactctgccatctttccaataagtaaatcgtgtgacctgggaggggctcgaaccctcgacccaatgattaagagtcatttgctctaccagctgagctaccaagtcaacatgttatttgtttgagtgacctgggaggggctcgaaccctcgacccaatgattaagagtcatttgctctaccaactgagctaccaagtcattctgtttcgctatcgttactttttcaaaccaccgtttgtttctcgattgcgggtgcaaagatagaggttttatttttccccgcaaacttttcgactactttttttcataaaattttaatcaaactcgtaaatatccgagggtgtagtccgcttcaacgctaccaatgagacatctttccctacccttatgccctcttggaaaagacgtatatccactgtcttataggccagttcgggatggttattgtcccggctgagatggcaaagccagatattcttcaaaccggtattataatgggtcgccaagaactccgcggcctccctattactcaaatgcccggtcgggctcgccacccgctctttcaagaaagcaggatatgtaccgaaacgaagcatctcctcgtcatagttcgcttccaatattaaatggttcgccatgcagatatatttccccaccgtgtccgtgatatggcctacgtcggtagcgaaagtgaatttatgattaccatactcgatatggtaccccacattatcagtactatcgtgaggcacctcgaaagccgtgatacggaaatcacggataaggaatggaacttctttttctataaccttgcgagagacacataaggtctcctccacataccggctcttatcaatcccccggtgcacgtcggctgtcgcatagacaggaatgcaaagcttctcgcccaaatacccgaccgtcttgatatgatccgcatgatcgtgggtaatcaacacggccacgatcttggtaaaatcgatcgaccggtccttcaatactttctttatggtccggattccgatacctgcgtcaatcagcataccgaattccgaagtccccaaataatagcagttcccactgctcccactagctaaactcagaaatgatagtttcatactctcctattccgcaacactgctttttttctgttttacatagtatacactaggggcggaacgtctcagggatcgatacctccccgatcaacgagcagttcatatgctccttcacctcgtcgggtgtcagcccatggccgaagaggaacattagcttcgtcacggcgctctccgtcgtactatcgaagccgctcgtcacgcctgcctccaacaatttgtgccccgtctcataacggtgcatctccacacttccggccctacactgagtaacattcacgataacgataccacggtctacagcctccttcaacatattcaagaaccattcctcgcacggagcatttccgcttccgaatgtttccatcaccacacctttcagacccgggatattcaggatactttccactacttgcggagaaattccggggaatagttttagtatagcgatatttcggtccaacaaataatgcggcttcagcggcttacgtgataccggatgatatacctgcggcagatcatacttgatatagatacccgcatgggccaaagccgggtaattgtacgaacggaacgcattaaaattatctgcatttatcttactcgtacgattccccctcaataaatcattctcaaaaaagatacagacctccgggaccaacggtaagccgttctccttggcagccgctatctcgatcgccgtaatcaagttctccttcccatcggtacgcaacatcccgatcggtaattgcgatcccgtaaggatcaccggcttactcaggttctcgagcataaaactcaatgccgatgccgtatacgacattgtatccgtgccatgcagtaccacgaagccgtcgtatttctgataattatcggcgatgattttcacgatcttcatccacgagtccggccccatctccgaggagtccatcggaggatcaaactgtatcgtggccaccgaataccccagtttcttcaactccggcatattgtccttcaaatgctggaaattaaacgactctaacactccagtctccggattctcgatcatacctatcgtcccacccgtatatatcaacaggatggaagccttttcttgttgagtatgcatgtccatataattatgcaaagttaataaattattcttctcctttcaacaccggaacacttatatgatattttacggcgattatacgtgcgaggaacacgctcaacgccgatacgaactgtatcatcgccgccgacatagaagtttgcatacatatataatatatcaaaccgccaaagacacaagccaacgcataaatatctttccggaatatcaaaggttcctcattaatcaatatatccctcatcataccgccaaacgagccggttatggttcccatcacgatcgccacccacatggggaacccgaaatccaaggtcttggcgatacctaccaccacaaacaaccccaatccgatagcatcgaatataaaaaatgtattgttcaaacggatcacgtattttcggaaagcgataacgaacaacaaagccaaggccgagacaaccaaataagaggcttgttccatccaaaaaggcaccgcgttcaataaaatatcacgaatcgtacctcctcctacagcggtcacgacacccaccacataggcgccaaaccaatcaaattgtttcgcagaagccaatcttatgccacttatggcaaacgcaaaggtccctgtatagtcacaaaaggtgataaaatctatcattttgtttttttcgcaaaaatacggaatagttcgcaaataacagcatttatagaaagaatacctaacaataatttaaaccaaacgaatcccttaatgtttattatatataagtttgcggagtggttataaccgtaacctattgatttttatttacaaaagaaaattgagttagatgaggatgaaaaaatgcatgttgatcgggttgatctgtctgctatccagccaatggatgtgggggcaacacttccctcagatggatgcccgcaattacgtgagcgacacggcccttttcattccacgccgcccttggttggcagcaagcgaggtattcggaatgaacatggccgtctggactttcgaccgtttcttaatgaacgaggatttcgcgaagataaacggacatacgattaagcaaaacttcaagacggggcctgtttgggacacggataagttctctaccaatctggtggcccatccctatcacggatcgttatatttcaacgcggcccgtagcaacggactgaatttctggcaatccattccattcgcggcgggaggcagcctaatgtgggaattctttatggaaacggaaccgccctccatcaatgacatgcttgccacctctttcggcggtatagaattaggtgagattacctaccggctctccgacttattcatcgacaaccgctcccacggggcggaacgtgtgggacgggagatcttatccggtttgatatctccgatgcgggcgatcaatcgtatcatcacgggagaagcttggagacacagcagctccaaggggcgtgtctacacctcggttcccgtaaacttcatcgtgggtgtcggccctcgcttccttgccgagcaggaaggctccaagcatggcactacgagcatgcacgtatccttcaggttggattatggagatcctttcaatgatgatttctattcgccctatgaatggtttcagttgaaggccgggttcgatttcttttcgagccagccgctcatcagccaagtcaatgccgttggggctatctgggggaaacaggtctggagtaaaggccctcgtagtctggccgctggaatctttcagcatttcgactactatgattccgagttaaaatccaatagttcccaaacggtagctccctaccgcatatcggaagcggcggcggtcggtggtggattgatctattacaaaagaggcacgccggacaataaggtagatgtttacgccgaattatacggaacaggagtcgccttgggcgcaagcatctccgattacctccggctggaagagagagattataatctgggaagcggttatagcgtgaaagcgtttaccggattggcctacgataaacgctgggcgttcttgatcgatttggagaactaccatatcttcacatggaaaggatacgagccggatatagactggaatgcggtggaccctacaaagttaaacgtacaaggcgatgccggcaacgcacgtttaacggtattttccaccaccttagcctatatgtccaagcataaatggaatattgcgttgcgaaatcgttatttctcccgccgtacccattataagtatcataaagatatagatagctccacgtatgatattatgctgacgcttgggtggaggatttaattcttccgctcaagctcacgcagattctccatcttcttgcgctgcataaactcatagatgccttccaaatgctccgtcactttttggtttccgaactcatagaccttagagaccagcccatccaagaaatcacggtcgtgggatacgacgatcaacgtcccgtcaaagtcaagcaacgcctgcttcaagatatccttcgtcttcatatccagatggtttgtcggctcatccagaatcagcaagttcacaggctccaacaatagcttaatcatggccagacgtgtgcgctcgccaccggaaagcaccttcaccttcttcgccgagttctcgccgccaaacatgaacgcacccagcagatccttgatcttattacggatatcgccttgcgccacatcgtctatcgtctggaaaaccgtaagattctcatccagcagggaggcttggttctgggcgaaataaccgatcatcacgttatgccccagcgtcaacgtcccctcatgctcgatctctttcatgatacacttcaccaaggtagacttaccctcgccattcttcccgacgaaagcgatcttatcccctcgctcgatcatcagattagcgtttcggaaaaccgtatgatcgccatacgctttcgagacattctcgatcgtcaccggataagagcccgaacgaggcgaaggcggaaacttcaagcgcaaagccgaggtatcttcctcatccacctccaagatctccagtttctccagcatcttcacacggctctgcacctgcaaggtcttggagtacgtgcccttgaaacgctcgatgaactctctcgtctcggcgatcatcttctgttgctcgtcataagccttctgttgttgctcacgacgttccttccgtaattgcaagtattggctatagtttaccttataatcataaatccggcccatcgtcacctcgatcgtacgagtcgtgatatgatccacgaacgcacggtcgtggctgatcaccactacggcctgaccgttatcgatcaagaaatcctccaaccactggatagactcgatatccaagtgattcgtcggctcgtccagcaaaaggacatccggtttcttcaacagtagtttcgccagctcgatacgcatacgccagccaccgctgaattcactggtttgccggtcgaaatcctcccgtttgaaacccagtcccaacaaggttttctctatatcggcgtcgtaattgatctcctctatggaatagaatttctcgctcaaggtagagacccgctcgatcagctccatataactatccgactcatagtccgtacgagtctccagttgcttattcaattcggcgatctccgcctccatctcgtgcagatgggcgaaagcctgcgccgtctcctcgaaaacggtacggccatcctccgtcatcaaatgctgcggcaaataagcgatcacggtatctttaggggcggacacttttccacggcttggctcccgcacgccggccaatatcttcaacaaggtagatttaccggcaccgttcttacccatcaaggcgatacgatctttctcgttaatcacaaaagaaacatccgagaaaagggcgcttccaccaaactctactgttagtccgtcaactgaaatcatatgtttattttaatacattaatataatgaagccgcgaagataagaaaaatccctttcattagggatgtacaggagatttcatacgatctttccggggcaagactaggaagaaattggttgccgatgccgtcggcaatattttcgacgccgtcagcaatatttccgacagcgtcagcattattgccgacggtgtcggcaaccaattgcataagggactaatcccttaaactacctttaaaaaaagcagaagcatccacatattttccaacaaaacgcttgttttataaacagaaactcctatctttgcacccgctaatacaaacagcttaaattaattattcaaacatggcaacaaaaattagattgcaaagacacggtcgtaaaggttacgccttctaccaaatcgtgatcgcagacagcagggctccacgtgatggaagatttattgaaaggataggttcttataatccgaacactaatcctgctacagtagatttgaacttcgaaagagctttgtattggttacaagtaggtgctcaacctacagacacaactcgtaacattctttctcgcgaaggcgtttgcttgaaaaagcatttattggaaggtgttaagaagggtgcgttcgacgaagccgcagctgaggagaaattccaagcttggttgaagaacaaacaagcttccgtacaagctatcaaagaaaaagacagcgaagcagctagagcagaagctaaagcacgtcttgaggctgaaaaggaagcgaataaggcaaaagcagaaatcgtagctaaaaagaaagcagaattggcagcagctgaagctgctaagcaagctgaggaagcagccgcagcggctcccgctgaagaagctccggcaactgaaagcgctgaataattcgtgcgatgccaaaataaaaaagaggacatttttcaatgccctctttttttatgccttttccaccagctaccggatcttcctaatgcgtataatcgatcagccggatgccatcgcctaaatcgttctggataacatccttcatccttttggcgaaaggacaggcataacctatcggcgtccctttttggatacaggaagcaaaagcgatactatccgcccctctattcaccaactccctcgcccttaatacggccttttttccgggacaacctccgcaattgataaacccgatgatctcaatatcttcctctacgccctcaaaggctccctttttctcacggatcatcctaaaatcagtagtaccggggcaaaaatcctctgtttgcatacatctgataattcctactttcataaagcatccctcccaattaaaaaagccgtaaaatctaaaattctacggctttccgatctataaatgatgattaactaagtcgtgttacttcttcttcaacaagaaagtatcgatctgtttcacaaactcctcacggggaagagctcccatcgatatctgaggctgtccttccttagggataaacaagaacgtaggaatactttgtataccgaaagcggcagccaactccttttccttatccacatttaccttataaactacgatatcattcttatacaggatagccaaatcccttaaaataggagccacttgcttgcagggaccacaccagtccgcataaaaatcgatgatacaaggcttatcaccttcatatacccatttcgttgcgttcttctcgtaattgaataccttttgcaagaactctgccttgttcaaagtaacgacctctcccttggaggcggtaccagcctcacttgatttatctgatttagcggacatcgagcagcttactaatagcagcacaaccgaaaccagccataaacttttcaactttctcatatagaaaccttttacttgattgataaattatttgctacaaaaatagcaataaaaaggggattcccacacattctattcttaaaagaaaagaataaacaaaaagaaaaaaagcgcataagactcttgtatattccaaaagaatgactacctttgcaaagcaattaaacgaaacgtttgatcgcaaaacatattggaaagatggcagagtggtcgattgcggcggtcttgaaaaccgttgaaccgagaggttcccggggttcgaatccctgtctttccgcagaacctactgaacaaaacaagagagtaagtggacaaaaacctacaaatcgctgatttgtaggttttttattgcctataagtcttgtgtccaatgccttatcagaagaaaattcggctcacctgataatcagtgggggtatcttcaggctcatctatatttcagccggcaacctaagacaagtcgacctacagaaatatagaagtcggccaacagatgagatcatgggataaccattgccatataaatcgctgtcttatatcctgttaatcaacaggccaactcacttgagaaaggcttcccaagtgaataactaaccacttccagactcgtaagcttacggctacccccagccgtaagttattcacttgacaagccgtaagttattcacctgacaaggcataaattatacattaaccgtctcttccccgatggttatcgggaaatggcagaggaactatagatacaagtggcccatttgtctttttgacaacttgtaatctgaagtcccggagaatcgattattccgtacctaagtgagtctcgcttcccaattcgagagaaaaaaacagcaattctctatttgatagctgtttgctgaaaaacggcctttcgttccagtcgaaataattcaccctagttcatgttttacggtcgttaggcggtaataatgcccaacgctaccgcatctgagggccgatgcctatatatgtgtaggcttacgccactatatgtgtgggttgacactgctatatgtgtgagttgatacagctatatgtgtaggttgatacgtatatattcgttaaaaagcgacgtttatcgtgttaaaaagcggttgtggcagcttgttcgcgctccccgtttacgctcgttggcttttatagccagagagccgtgtcgtgaaaaagaaggcatttcaatcaaaaagataccattcatcgcgttaagctgacatccgcgattcttgttttatccctttgaattaactctgttcccaataaatatcgggtgagccaagtaatcgcatccagacattgcatctctatgtaaattcgcaagcgaaactcttgcataatcaaaaaaaatcaatacctttgcacccggtttcaacaagaccttggagagatgctcgagtggttgaagaggcacgcctggaaagcgtgtaaacccctaaagggtttcgcgggttcgaatcccgctctctccgcagaactaaccagacaataaacagctaagtcccacaaatcgttggatttgtgggactttttagattttttgttacctacactaaatcttcttgtttgatcgaataacacttagtgtttgtaagatgacagacaatattattacccctagccctatataaaaagcggcgttcaactctttagcctcactaaaaagaagcatagccaagataatgctataaataggttccagattataactcaagtttatcgtgaacgcagagatctttttcaggacttgtatctgaagtaaatacaaaccaatcgtacaaacagaagctaaaagcaataaataagtaaaatctaatagcccgggaacaatcgtcgatacaggaaaatatcgcaaatagaacggtaaaatacaggaaagcccgataaagccacctaccatttcatacaagagcatggtacttgttgaataattatttccgatcttcttattcgtgatcgtgaacaaagccgctaaagcggatgatataatacccaaacctattcctaaacgatagcgagtatcgaaatggaaaatcagtaccaccccgaataaagtcaacaaactaaaaacaacctccttgaaagacactctatgacaattaatcaatggctctagaaaagccgtaaagaaacctaccagagaaaaacaaaccactccaatagacacattcgaagcctttatacttccataaaagaaaacccaatgcaatcccagcaataaccctactccccctattctcaaggcatccccgaaagaaaatcgattcaatcttttgctgacggataaaacgagtaaaaacaacaaagacgcaagcatcatacgataccagaccaatagggcttcattcaagctaatcaattttccaaatatgcccgtcgcacctgccaaaataatagatatatgcagttttataaatgcgtctttcactatgtcactattctatttaattatggacaaatgtacaaaggaaatataagctatcgaattcaaacttgataaatactccgttttttaccctaatggtaacttttttctaaatagagaagcctacttttgtgccgcaaaaataaaaagaaaagaaactgatgatgcaagacagtattgattttggaacaatgaacattccgaagttgttccgtatgatgtttatccctaccttattaggtatgatcctttccgccactattaatatcgccgatggaatattcgtaggaagaggcgtaggaaatgacgccttggctgcggtaaatatcgtggctccttttttcatgttagcaaccggaatcgggcttatgttcggagtaggcgcatctatcgtcgcctcgatccacctttcacaccagaaagttaaggtagcgaatattaatatcacgcaagcgctttcggtctcattatgtattatgttatcgctttccttgttagtgatgacattccgtgctgaggtcgctcttttattgggtagttccgagcaattattgccctccgtattggaatatatgaactggatcgtcccgttccttgccttttacatgttattgaatatcgggttattcattatccggttagacggatcacctacatacgccatgttatgcagcgctatcccggccctgataaacctaacattagactatattttcgttttcccattgcattggggattaatgggagccgctttagcttccgctatttccgtaatcgtaggaagtattatgatcgtggtttatatcgtaggtttttctaaagtattacatctttaccgccctaaattctcgattaaaagtatcttattgacaatccgcaatatcggatacatggtaaagcttggttcttccgcattcttaactgaggcagctatcgcttgtatgatgctggtgggtaattatatattcatgagataccttggggaagacggggttgccgcctatagtgtagcctgttattgctttcctatcgtattcatggtgaacaatgcgatcgcccagtctacccagccgatcataagctacaactatggcatacagcagtggaaaagagtacggcaggcgtttaagttagccctgctatgcgctgtcgtgtgcggaggactcgcctgcgtgggtactattttattctgcccggaagtctcctccttatttctcggtaatcatggcaacgcttacgagatagcaatctccggtattccctatttttctttgggatatgtctttttcgctctcaatatcgtttgtatcgggtactaccagagcatagaacgtttcaaacccgctacgctattcactattctacgaggaatcgtgattatcaccctaagtttcatgtacctacctgttgtctgcggaattaaaggtatttggctggccgtacctttgtcggaattaattacttttgtaatcattgtggtatactatctattgaaacgtacaagagcatgaaagaggaagttcgccagaaagtgatggaacggttttcaatctctgagcaggccatgcggttattgctggaaagcgcagagatgatgtcgtttgtccctaaagatataatcgtacatgaaggtgagataaacacgaatatgtatatcttatccaagggaatctggcgggcttatacatttaaagatgggacggaagataccttttggttcgccgtggagagcgagatcgcactcccggtatggggatatacttccggctctccttctctttataccatagaagccgttacggaaagcgaggcgtattgcctatccaaacagaaactagaaatcctatttcaatcctccgtgcaattagcaaatatcggaagaaggattctagagaattttatgcttgagatcgagacttcatggttaagttcttacaaacgaaccgccattgaacgttacgccattctattggacaagcagcccgaaatcatccaatccgtccccctaaaatatatagcttcttatctaggtgtcacggctcaatccttaagtagaatccgggcgaaattaactagttctttaacctttatcgtgtaaagcctcttcatttttataacgcatcgataaccaacctctgacttttcataaagtcaatacgttaaatccgtaaataacgatcaataatctcataataactttctatcgcattagcggatcggagcaagttcatatcgaaagtcactctattatacaagtgatttcctatgatctgatcccaacttacaggaaatttgcgcaacctcatcaatcgtaaaagcgacctccccacgaagcctgcggtacaccgcctctctcccgatacataaagtatccgtcaagaaattagcaagattttgtccgggaggaagcctatctttcattgcggttatcaattcatttacaatactatctttcattgccttataccttatttccaactattaatattccttgatacatttggcaaatgtaaaacatgtaaacgatagttttgtacgataaagcaagcctatgagaattgttccttttctaattaaagcaaacacagacagaaaaagatagaaaacgaaattaaactaaaaaagcacctataaatttcgaatcgcgcaatcggaatatctaggttgtttcatttatcgaaacaggttcaaaccctaaagcgtatttataatctccctttgtctattgaaaaactggatacgttgcatctctccactctcggagatcatggtagagaacttttttaaagattgaatccagtctttcaagctattaaacatctcagtatcctgtgtcgtaatagaatttatcgagtaaacccgtatcatacttaactgcaaagaacttgtttccagataactatacgtagcctcaaagttaatatgcgatacataaattcgtacactattgccagcctcggtctttcctctcatggcaagttcttccaattcatccaccaacactaataactcctctttgatacgttgtatatcctcacaggaaataagatggatatcggagaaatatttaatgtcattgaccaaatgatggaagatcatattatcccaaatataatccgtagaatggatatactgtgtcaacgatacaaattctctttgggtatcaaccagtttttccggtatcttcagattctcaaaatgattgcattggatatgcttattctgatacatccacttaaataaacgaaactttgacaaaaggtcatgcttcaaataaagggtctgaggaatagtattggaagaggtacccaaagccgtagtaggatcatcctgaaaggccctaaagatcttcacatatctagacaagatcgtaaaataagcattaaaaggatcatcgtgatctaccacattcaagtcgaacacggcattggcaccaaaactaacccctactattttatccaatgacacacccaatttccttgagataagagcagcctcttccaaggtgaaaggaacctcgccacgtaagcgcctataaatggcttctctgccaatataaagggtatccatcaacagattcgccaaatttgtcttagggggaagtttttcttttaaagcttcaatcaagcctgtatttaattcatttatcatcataaccatgtcgaatgaaaaatcatctactctagtaacatatatagagagggagttgtttcgagaacaagtacattcgtagatggattttcaaagcacgtagcttttcagcttattcatatcaactattttcccttcccgggaaatagccccttcctctatcatttccgagaaactacgggccaatgaaggacgagccactccaaaatattccgaaagctctgtttgattacgatcctgcttataatgatccccttgaatacgtttaagtatatagtaagccagtttacctttaatggtcttaatcgataataattgaagacgttcagaaagaaattgtgttcggttggcgttaaaagccatatagctttgaagaaaatgctcgtttgtcgccagcaaacgcatcaccgcactcttaggtattaaaataatctcgcattcctccaaggcgataacatctaccgggaagcgattattttccgcaaacaaaaatgcggaggccaaaggagtaggcgccgataaagtctccacttccagaattgtcccgctttcggtgatcatctcagtctttacccgtcctttactcaatagataaagcgaagataaggcatctccctgacgagccacccagtcacctttcttaaacgaccttgtcgaataatccaacgaactgaaaagagcggtttgctcttcctcagacaattttccgcaaataggacacaaactcagattcataaaacttccttttgcggataaagataaagaaaataatcaaagagtgtaacaactgttacagattaaacgaccttctcccccctacattcgcgataaactttaaaaataaaagctatgttctgttatcaatgtcaagaaaccgcccaaggaaagggctgcacattaaaaggtgtatgtggtaagaccgccgaagtggccggattacaagatttactgatgtacttaatgaagggaatctccaaattaacaacgactttacgcaaacaaggcgtggaatcatccacggccaataagtttatcgtagacggacttttcatgaccatcacaaacgccaatttcgattcatccaggttcgtctcaaagatcaaggaagcctatcagctacgggagaaccttctcaacgaattgcatcgactgggaatccatctttccttaacctgcgactgtctgacttggaaatcggataaagtagaggaaatggaggtcaaagcgaaagaagtaggtattcttgccacagaaaacgaggatatccgttctctatgcgaattactcacttatggggttaaaggtatggccgcctacgtggagcacgcttacaacctaggtttcgaggataccagcctctatgcctttatgcaagatgccttggtaacgacgactcgatcagacctgactgtcgccgatttaacccaatgggtacttacctgcggcgaatacggagtaaaagccatggccttattagataaagcgaatacttccacctatggcaacccggaaattacgaaagtgaatatcggcgtaggaaagaacccgggtatacttatcagtgggcacgacttgagagacattcaagacttgctggaacaaaccgaaggtacaggcatagatgtctatacacatagcgagatgcttcccgcacattattacccggctttcaagaagtataagcattttgtaggaaactacggtagcgcctggtggaaacaaacatccgatttcgagacattcaatggagttatcctgtttacgaccaactgccttgtccctccccgttcttccgccacttatgccgatcgggtctatacgaccggctctaccgggttcgaaggattcccacatatcgccgatcgtaagcccggaggctctaaggatttctctgcgttaatcgaacacgcaaagaaatgcgcccctccaacggaaatcgaacacggggaaatcatcggtggattcgctcatgagcaggtattccaattagccgacaaggttatcgatgccgtaaaatcaggagcgatacgtaaattctttgtcatggcaggttgcgacggaagaatgaagagccgtagctactataccgaattcgccgagaaattaccgaaagataccgtcatattaaccgccggttgtgccaaatatcgttacaacaaactgcctttgggtgagatcagaggtattccacgggtattagatgccggacaatgtaatgacagttactcattggtgatgatcgccctcaagttaaaagagatcttcgggctggatgatgtcaatgaattacctatcgcatacaatatcgcatggtacgagcaaaaagcggtaatcgtattactcgccctactctacctaggcgtaaaaaacattcacttaggaccgacattgccagcgttcttgtcgccgaatgtagccaaagtattggtcgataatttcgggatcgccggaataggtagtgtagacgaagacatggaactatttctaggaaagtaaaataaacctttaccgatccgctcttgttttcctatcacattttaatcgattcaagatgaataaggaacaacaaaaaagagtagccgccattcatgacctatcgggattcggcaaatgttcattgacagttgccctcccgatcctctcggcggcaggaatagagacaagcgccttacctacggccatactttctacacacacaggaggtattctcggctatacatatagagacttgacggaagatatgcgtccgttcatgaagcattggaaagaattagatatccgtttcgatgccgtctacagcggctttcttggatctttcgagcaattagatatcgtaaaagagttcttctccctttttaagcgggaagataacctgattctagtcgatcctgtcatgggcgataacggagaactgtacaagatattcacccctaaattcgccaaaggaatgagatccctttgtgaaagagcggatatcatcgtaccgaacctgacggaggccgcattattgttgggcgaaccctaccaagcaggtccctataccaaagcttatatcgatggtattttacataagctaagtcagctaggccctaagcaagttgtcttgaccggtgtctatttcgacgagaaagaactgggagccgccactttcgatatggaacgaaatgcgacagagtatgttttaacagagaaaatacccggttattatcatggtacgggagatgttttcgcaagtgctttactgtccggtttgttaaataatttcaacttggagagatctgcggaaatagccgttcgcttcacggcagaaagtattcttcgaacattcaaggcgcaaacggattatcgctttggcgtgaacttcgaacaatccattccggatttactaaaagaactgaaactgatataaatgagagccttttttttctcatatttgcaaataataaggaatataatagtatggctaaattaagaatagcgttttctggtatcggtgcggtgggtggttattacggaggtatggtcgccgcccgctatcaaggaacaataaaagcagatatcttttttatcgcccgtggagaaaatctaaaggctatccgtgaaaaaggtttacaaatgcaactaggcatccggacaatccatacggctccggcactagccaccgataatcccgccgagatagggccggtagactaccttttctgttgtacaaaaagttacgatctagaagaaaacatccagcagctaaagcctgttatcggacctgagaccgttatcatccccttgctaaacggattggatatcgaagaacgaatccataatatactacccggacaagaggtctggaaaggatgtgtttatatcggttcccgcttgacagagccgggtgttgtcgagaaattctccttgaaggaacgtattttcttcggcaacaaagatgcaaacaaagataagcaaaccgagttgcttaaattacttatgtatgcccggttaaacgcttttaatccagcggatatagacctacgcatctggaagaaattcttcatgatctctacggcggctacggctacgagtttcttcaaccagcccattgatgaagtactagcccaacatattgatctattcatcgctttgggtacggaattaaaaagcgtagcggaggctatgggagtctgtttacccgatgacatcgtctatacttccatcgagacgcaaaagatgatgccggccggctccacgacttccatgcatagtgattttctcgccgggaaaaaaacagagttggaaacattgaccggatatgttattcgtcaagcggagaagctcggcgttgatgtccctacttatcgatttatgtataacggattgtctttttatccctatccgaaaaatcagtaatatcatacattatggaagatctaataaacgggcgttgcggttggtgcggaactgacgagttgtatatggcgtaccacgatcaagagtggggaaagttggtgactgacgataaaacactgttcgagtttcttgtattggaaagctctcaagccggattgagttggataacaatccttcggaagcgtgagggatatcgtaaggctttttgtgacttcgacaccgaacgggtagcgcaaatgaccgatgaggatgttgaacggttgatgcggtttgagggtatcgtgaaaaaccgccagaaaatcaaatccacaatcacaaacgcaaggctgttcctcgccatacaaaaggagttcggcagcttttacaattacaccctgtcattctttcccgacagaaaaccgattatcaacacattccgatcattgagcgagatccctgtcacgtcgcctgaatccgaagccatgagcaaggacatgaagaagaggggcttcaaattcttcggacctacaatttgttacgcccacctacaggcttcgggatttatcaatgatcatctgatagactgcgtttgcaggaaaggataataaaaaggggatgtgtcaaaagtccggtttattagatttgacacaccccctcattattatttagcgcatcgatcttattgaccgatataagtctccatgaacttagcgcccggagccggagagatggttattacctccgtgtccgcagggatcaagacagtttgaccttggtgtacaaagatctcgtttcctttattatcacggatggaagccttgcctgccatacagatataaacgacaaaagaatccagttccgagaaattacgaaccataatcgtatccagatccaaaaggtttgtcgtgaaatacttacagtccgccaactctaccgtggcattcgtatgacctttgtagtgagtacggtaatccggatacaacgtataatcgattgcgtctttcgccaattccgtatgcagctcacggccattaccgttcgcgtctttacggttgtaatcgtaaatacgatacgtgatattactagtctgctggatctctgcgataaaacaacccgctccgatcgcatgcacacgtcccgccggcaagaaaaatacatcaccttcatttacgtcgtaacgttgaagcacatccatgatcgtattgttctccacccgtttcacgtattcctctgcgtcgatttgctcagagaaaccggaatataggccagcgcctttctccgccttgatcacataccacatctccgtcttaccgaaagagttgtggcgctttttcgccagctcatcgtccgggtgaacttgaatagataaattatcacgggcatcgataaacttgattagcaacgggaaagtcgtcccgaatctctccatcaccttctctcccagcaactccttgccataagagcggatcaactcatccaaagacttgccttccaactcgccattatcgacaatagaataatttccctcaacatgagaaagctcccagctctcgcctacaccattctcaaccggaataatacccttaaacgggcagatatctgaaccgccccaaatcaccttcttgaggatcggcttaaatgtaaatggatataacataacgtgtttttgtgtatagagttttactttttgaccttcactttccttaatacgacggcgctacgtgccgggatataaagtttcagccattctttcttttctttcttatataacggatcaaattgcgtgaaatgccttatggtatcatcagccaagccaaaccccccgaaacgggtagcgtcagtgttcaatacgacctcatattctcccttcggaaccaagaaaccgtaatccgtgaacgatttcgtcgggctaaagttgaacacaaaaaccaagtctttacgcatataagccaatatctgatcgccatcattatcccaaaccttctggataggggtatcttggaaattcttcacatccccgatcaattccaacatctcacggtcgaaatcgcccaagaaatggtacttcaaatccaagttgtccaccaaattccattggcggcgagcgtatttataagaccatccattgccctcccttgggaagtcgatccactccggatgcccaaactcatttcccatgaagttcagataaccgccattaatggtagaagccgtaaccaaacggatcatcttatgcaaggcgatacctctatctaccatgaaattatggtcatctttttgcatatgccaatacatatcggcgtcgatcaagcggaagatgatcgtcttatcacccaccaaggcttgatcgtggctctcggcataactgatcgtcttctcatcggcacgacggttcgtcgtctcccaccagatcgaagacggatgccaatcctcatccttcttttccttgatcgtcttgatccaataatccgggatgttcatggccatgcgataatcaaagccataaccaccatcttcgaccttggctgccaaacccggcatgccactcacctcctcggcgatcgttatagcgcccggattcacctcatggatcaatttattggccaaggttagataagcgatagcgtcgccatcttggtggccattaaaataatcgccgtaattacagaaagcctcgcccaagccatggctgtagtaaagcatggaggtcacgccgtcgaaacggaaaccatcgaacttatactcctccagccagaacttacaattcgacaataagaaatgaagcacctcgttctttccataattgaagcacagggaatcccatgccggatgctcacggcgttcgccactcaggaaatattggtcatacgaaccgtcaaagcggcctaatccctccacctcgttctttacggcgtggctatgtacgatgtccatgatcacggcgagacccatcccgtgcgcctcatcgatcagttgtttcaactcgtccggcgtaccgaaacgggaagaggcggcgaagaagctacttacgtgatagccgaacgatccataataaggatgttcttgtatagccatgatctgaatggcgttataaccatccttcgctacacgaggcaatatattttgacggaattcattatacgtccccaccttctcctcgttggtgctcataccgatatggcactcgtagatcaaaaggggagacttcttaggtttgaatcgtttattcttgaatttataaggtttctccgggttccatacttgagcgctgaatatcttagattgctcatcttgcaccacccggcgagtccatgcgggaatacgttctccgctaccgccgtcccactcgaccagcaacttaaacaagtcctcatgatacatctgcgcatcggtcaaagcgatctcccatacgccattcgccttacgtttaagcttgtatttattatctttctgccatccgttgaatgttccaatcaaataaatagcggtagcattcggcgcccattcacggaacacccagcctttcgtggttttgtgtaacccaaaataaagatatccggaagccatctcggataaggttagtttaccattattcgtcaggctcttttctttatcaatcacgtattgataccggccttctatagccgcctcataaggggccagccacgggtcattttttatcagatttagagactccatgatttattataatttggttctcggcaaagataaaagaaaaaaacatacccattgataatattaggatatttcttatattcgcggtaaaccgtacaaagatgagcaaaggaacaaaaagtatagccttttacctaatgatgatcctcattttcggttcgctgatgtactttatcgccaaagaaggggaaagtcagcaactggaaaattcgattgcgtccattcaaaacgcacctagtaatttagaagagggatttaccatatttactcaattattagtacataatatcgagtcttccataggaattctgcttttacaaatcatcacgatattgcttacgtgccgtttgttcggttggttattccagaagatcgggcaacccaccgtcatcggcgagatcgttgccggaatcgtgctagggccgtccgtattaggcaatttattcccggaggcttccgccttcctttttcctgtggaatcgttggtgaatataaatatgctgagtcaattcggacttatactctttatgttcgctatcgggatggaacttaatatctccgaggtaaggaaaaagctgaaagagacgatcttaatcagtcataccagtacgatcgtccccttctttttcggtatgctgaccgcctatttcgtgtacgacaaatatgcggataagagtacgcctttcctctctttcgccttgtttataggtatcgccatgagtattaccgcctttcccgtattggcacgtattatccaagagaaaggacttaccaagacacatttgggtaccatctcgttggcaagcgcggcgaatggggatatcaccgcatggtgcttgctagcggttgtcatagcgatcgcacaagcgggttcgatgctaagtgccgtttacaacatcttattctcagttctttacatagtgtttatgtttttggcggtgcggccattcctgcggatgatcggacatatctaccacaacaaggaggtaatcgacaaggggctggtcgctttcatcttcttgctattgatcacctcggcttatctgacagagatattgggattgcatgccttattcggcgcttttatcgcaggagtggtgatgccgggaaatgtcaaattccgcaagatcatgaccgagaaagtagaggatgtatcccttgcgctatttcttcccttattcttcgtatccaccggattacgtacggaaataggtcttctaaacaagcctgaattatggtggctatgccttatcttcatagtcgtggccatcgcaggaaagtttgggggagcgatgttctccgcccgattcgtgggtgagagctggaaggatagtctctatataggggctctcatgaacacccgtgggttgatggagctggtcgtattgacgatcgggtacgagatggggatattgacgccttccgtattcgtgatcttagtgctaatgacactggtcaccacctttatgacaaccccattggtctcattcatcaaattctgttaccgggcgcatgataagctgatggagcaaaaagaaagaatgccattggagggaatattcaaggtactgctatccttcggacgagccggaaacggacagatcatgctggacgtggcctaccagatgttcgcccaaggcaaaaacaaactggagctgacggcactgcatttgacggttggctcggatgtaaacccgctacacacggataatttcgaggaagtcagcttcggcccgatcctttacggggccaagaagctgggcattcagatacagactcgctacgaggtatcgaacaacgccggagtggatatttgtagcatcgtaaacaatgaggggtatgatttccttctggtcggttccgggatatcgatgagcaacacaccggacgatatagcggcaagccattaccgggcctcgttctacaaccgttatttcaaacgcttcaaggctccggaatcctggttttatccgggtgccttattgaaagacaagacgaagatgtttatcgagcaaagcaattgcccggtaggtgtattcgtgaaccggaatttcgtcaaggcatcgaacgtgatcgtggtcatcgactccgaggaggatttattcctgttgggatacgcccagaccttattgaagtctacacacggctcggccagcgtacttgataaatccagcagtacgaccccggggaacgaggtgatcaaggaaggaatcctgcgattcacggaagacgtgaagcagaccacgcttctacgagagaaagaccttacgccccagtctttcaacggcttcaacttcatgctgatcagttataagacatggaacgatgtctccgagcaccggaaagaagccttgcagaagatgccttctacgttgatattaagtaaataatccgttataaaccatataaacccgtctttatgagaatctgtcttttcttcttgatcaccgttttcctcatggcctgctcctctacggggaaccagcggcaggaaccggaaaaccagaccttggaaacgatactcaatcgcaaaagcgtacgtaagtataaggatcgcccggtagaaaaggaaaagatagacaaactgatacgagccggaatggccgccccttcctcccgtgacaggcgaccttgggaattcattatcgtaaccgaccggaaagccttggacacaatggccgaaggtctccccttcgcccggatgctgaaagagacaaggcaagcgatcgtcgtttgcggcgatacgatcaaatcctccaacgcttggtttctggattgttccgccgcctcgcaaaacctgctacttgccgccgaatccatgggattgggagccgtatggacggctgtttacccctatccggaccggattgagatcgtccggaaagagcttcggctaccggatcatatcatgccgttgaacgtcatacctgtgggataccccatgcagaaagagactcccaaaaacaaatacaacgtccaacagatccaccacaatggctggtaaagctatatgacttccagataactccgtccgtttcccgcccggttcacccggatctgcacgggaatacgttccgtcatttcctgtacgtgcgagataacgccgatcttgcgcccttgcgtacgcaggctctccaaggcatccatagcgacccgcaacgtctccgcatccaaagagccgaagccctcatcgataaacaagctctctaccttcatccggttcgaggagagagaggacaagcctagcgccaaggccagcgagaccaagaaagattcccctccggaaaggctatgcacggtacggatctcgtcgcacatatcttggtcgatcacctgcaaagccaaggtatccggcacacgctccaaccggtaacgccgggatagttgccgcaattgcacattcgcgtaattcaacaagacatccaaggtgtacccttgtgcgatcctacggaacttggcgccatccgcagagcctgccagctcattcagcttcgcccaacgctcgctcatcgccctccgctccgagagctcttgctggaagccggctatcttccgcttattctcctcgtgcgtacgcagacggaagctacattcagacttttgggccgtcatttccgacagggattcctccagcgtcttcccctcggagttctcttgataggcgaccatccagttatccagctcctgccggcgtgcggaaaggagaccggaagtctccgccagatccttcttgatctgttccgtaaccccccggtattgctccacctcgccggcgtgcctcgttgtactctcttgcagctgcttcaaatggctcttcaaggcttccacccgttcgtggaaggtacgttccacctggtcggctggctggcctcccagcaggagattccgctccgaacgcaagcgggtataggattgattcttctcgtcgtaggctttcgcggcgtcctcgtactgcttgcgcaagggagggaggaaagcctcgtacgactcccgttccgcttgatgggcgctccgctcccgttccagttcccgcaggcgttccccgttggcttgccactggcgggcgaaatccgtcaaggtctcccggaagctttccgggtccttgttccagcccgtctgccatgcgtcgttcccgaacagggcgttggccgctgatagggattgggacagcttctcctgctgttcccgcttatccagttcttcccggtcgatttgctcggacaaggattgtaactggttccttaattccgtccgtgcgttctcgtccgcggcgagttgtttatgcagctccaattctttctgttgcagggcggcgagttgtttcccgcaggcctcctgccgttctttccggtcgagaagccgcttgaggcgcagggtagcttccgaaatgcgatccgccaaggccaacagacgctcatgcgcctcgtgagaggcgaaaggatgctcaaggcttccgcagaccgggcaaggcgttccggcggtcagcttgtcccgcaggcttttgatatcgccagtcgtcacgaactgggcttgctctagcaataaacgctcccgttccgtacggcaggtctcgatcgatcgatccaaagcctccggttccaattccttgagggcaagcgctacggacttccgctcttcctcgatctttacctgttccttggcgtgcgtctccgcttcccgccgcaaggattgcctccgaacctccaaccgctgaattttctgtcggatagctagcaaggccttgtccgaccgctcggctgcccggcgagccgtgaagcaggtatccagatggatcaataaggccgacagttgctcggcgatcccctccttgctccggtagcgttcacgccacgccgtcagcttgtcccattcctccgaggctttcttctgccgctcttccaccttcctgagtttctcttccgcctcctgcttccgccgggagaagtctttcatccgttcatcggcctcggagcgggctttcaaggccgattccagttgcacgtccagtatccgggcctgttgcaattccagtcgcagacgcttagattcctcatccgtcctcgccaatcgcacctccccttgctcatactccttcctcgcggtttccagcgataccaacgcccgttccaagaagcgggcgttctcctcccgctgtttttccttcgaggcgatctggacctcggccgctttcacggcctcccgcaagctttgccgctcggccctcgccttctccaggcgagccagctccccctccaaggccgaaaggcgggtttgggaggcttccacctcctcctccgacagaagctctatgccttgtacgcgggcgtatagctgctcgtaggcctccttcgcctcggcgttcttgacgaagatccggcgggagatctccgagtattgctccgtaccggtcagtttttccagcaaggaggccttctcgccctgctccgctttcaggaaggtagagaaatcgttctgggccaagagcaccgagcgggtgaactgatcgaaagtcaggccgatcagctcgatgatacgggcttgcaggtccttgttggttcccggctcctctttaccggcatttatattatataatgtaaagcgagcggcctgcaaacgtccgctttccttctcccgggcccgggataccgaccaacggctgcgataccggcacccgttaagcgccacgaaatccacctcggcgtagcctgaggccgtcccgcggcgcaagaggaagcgggggtcgctttgcggcaacacatcctcttgcacgtccctcagccgcacgttattctccctcgccagctccgttcgcggcgtacgggagaaaagggcgaggcacatggcatccagcaacgtggattttcccgcccccgtaggcccggatatagcgaagatacccgccgaagccaaaggctcttccgtaaaatcaatggaaaactctccttccagcgacgccagattgcgtcctctgatcgccagcactctcataaagaaacctccctcatcacctcattaaacaatgtctctatctcctcgggcaactcgcctccgtatctcgcagcaaacgtatgcctcagcatatccagcggggctatcttttgcaaatcgttatacgataaggcccgctcctctgcctccccttcccgtcggggatacgaaggaacgatggaggtgaggcggaccgccttcccgaccaacgcctcctctacccgatggcggaacgtagggtccggctccgtcagcaggacccgtatctccaaataaggccagcggctctcgtcctccctgccctcctccggctccggaagcccggcgaggcatcgcaagacctcctccggtggtaacgggctgtccggtatacgcatcaagtccgcaactctagggatcccgatcgcctcgatctccgtgaccttcccctcctcgatctctacagctatcacttgatgccggtagttcttctccgagaacgacatgggaagcgggcttccggcgtaacgtaccgcctcgcgcccgccgatccgttgcgccttatggatatgccccagcgccgtataagcgatcccggcgtcgaaggtatctgcggatacggactccagacctcccatgatggcgcgctcgctccggtcgtcgtccgacaactcggctccggtagcgtggaggtgtcccaaggctacgatcgcctcgccggggttcctccgggcatccgcataggcatagagccgccggtacatccggccgatgcccgccacatacgaatcaagctctccctcgggcgccgccgggtaatctccttggcggaggaaaggcaccgccaggcaaagcgcctcccgttctcccgcccggttcctcaaagggatgacgagcgaggcgaggtcgatctccccggaatccgtcctccccacgatacctacgatcgaggtattcaattcctccagcaagggattcggggcttccagacggatcgcagagtcgtggttgccggcgatgatcacgatctgcaagcccgggttcaggcggttcgcctcccgcaggaaacgatagaaacggcgttgcgccccggcggaagggttcgtcacgtcgaacacgtcgccggcgatcagcaggacatccgtctgccgctccaccaaaagatttgtcagaaaaccgaggaaagcctcgtgctccgcctcccggtcgtagccgaaaaaggtctggcctagatgccagtcggccgtatggataagtctcaatgccatttatcttcttctattttgatctggcaaatgtacttctttcccatcagatatcagattttggtagaatgaaaaaaatgaatgatcaaacgtatccccccttatataccggcagcacaaccgagaagcggcttccttttcctagcttagaactcagttctatccgtccccccaagttttgtacgattccttggcagatagacaaccccagaccggccccttggctgaattcatcttgcttgaaaaaacggctgaacaccttctcgtgttgctcctccgatagaccgatcccggaatccttgacaaaaatcgctacctcatccgtccccctcagatgcttaaatcccaactttatatatccgctattcgtgaatttacaagcgtttgtcaagaaattggttataacttgagaaagtctctttttatccgtatagataaacaaatccccctccgcctctttcgagaatcgtaggtggtcggggaccaataactgatgggcgaggtaaaggtcgtctaccaactccttgacggagcagctctctttctcgaatttcatttgtcccgattgaagtctcgaaacctccagaatatcattgataagcaccaacagcagatcgcagctctgattgatcgtcttggcaaacagcagcttgtcggcctcgtctaaatccttctccgaggccagcaggttcgagaagcctacgatagagttcagcggcgtacgtatctcatggctcatgttcgccaagaacttttgctcatacccccctcatgaggataagctctttttcccgtttcttcatgtcattgatattgataagtataccactcacgtctttgcctccctccgcattatctaccgctggcatggcgctaaagcggaattcccaccattcataatcagatccggcgaagcgggcacggcattggaatacctccttgtccgccttccataaggattgccaaagtaatttgaaagcagtgagatcatcgggatgtatcagcctccacatctcttccaactcgatccgtgatgactggtcaccgacaggatactcgaaaaagaactcctcgtccttaaactcccagatgtatatgcctccacactgtatggccaaatccaagaagaaattcttttgagacagacgggaaaacatcactcctgtttgcttcttctcccgcctatacaaatataagacaccgattaatagggtgatagaagctgtctcaaaaacaggtcttagcctataatactcaaataagggcgtatgcttaggtaacaaatatatccccgtaaacaaggttgctaaaactaaaaatatataaagtagatatttcatgattccatggtttaaaaaagtatttcaccctatgctctaccccaagttcccattgtaaggagatctaaacgagcgtttagggatgccctaaatgggcgtttaggatatccctaagtccaaggtcaaatctcatcgggactttcgctatccggatttccagttcctactgagagaggataaggaaaacgattcctgcggatttccttcaagaaaaacttgttatttcccccatactgcgtggccacttccaaataataagatccatcagctaaggcagagataatcaacgaaaaagcggaaggatcgtttcttatcagggaagtcatcggtacggctgtctccgtctcgtcttttgcgttgacgaagaagaaaccaaccgccttaccttcttctccagctatttttatacggttacccgtaccgaccaaaccaccaccgggggtcaatttgccgttttgagtcccagtagagacatccgtcacgctaatgatcgtagggagtccttcctctaccgcacttacgatcacgctaatgcccttcatatcctccttaatctcggcacggggggaactccatagaacaacgctgttacgtgacgggtcgaactgggccttaggtccgatgaaagagccatccacgccaaatgagttattcgtaaatccaaattccacggtagaagctgagtaaacttcttgtttagcgacagcaaacaaatcgttataggcactttctaattcagagacggaaaacttgctaccattttgagcagccagtttacaaaggtctttgatcgtacggttcgccacataagttaccttgtaagtaaaatcgtcttctcgctctgttaacatatttgtgactagtttaccggttatactacgcattttggggtctgttgaagtcataataatcttgaattatgagtcctcatggagcttatggataaaatcctccatatctacttttattagtatcaattattaaaaataatatcattttctcatgattatcattgattatttaattattgtgcatacttttggacattttattaaccgagttccatgagtactctgttctaaattgaaaatacctgataccttcaccatataagtttcgagtatactatttgaatatggtggaactaaattgtacgcaaacctccggtatgcacccaagcctttttttgcttattctttttcacttattaaggaaaacacaagcaactatttgtaagcaaaaccaagcgaactcataataatttgttactttcgcggtggtttcaaataggacagtcaaaaaacaactaataaaaacatctatggcaaagattacaaaagaggaggcccttcggtaccatgccgagggcaaaccgggtaaaatcgaggtcatccctacaaaacctcacagtacgcagacggatctatccctcgcctactctccgggtgtagcggaaccttgtctggagatcgagaagaatccgcacgacgcatacgaatatacggcgaaaggaaacttggtggcggtgatctctaacggtaccgccgtactcgggctgggcgatataggccccttggccggtaagccggtgatggaaggcaagggattgctattcaagatattcgcgggcatcgacgtattcgatatcgaggtgaacgagaaagatccggagaagtttatccagaccgtgaaggcgatctcgcctacgttcggaggaatcaacttggaggatatcaaggcaccggagtgtttcgagatcgagactcgcttgaagaatgagctggatatccccgtcatgcacgatgaccagcatggtacggcaatcatctccggcgccgggctgatcaacgccttggagatcgccggcaagaagatcgaggacgtgaagatcgtggtgaacggcgccggagccgcctccatctcctgtacgaaactgtacgtgatgctgggagcgcacaaggagaatatcgtcatgtgcgacagcaagggcgttatctctaccagccgcccggacttgaacgctgccaagcgggagttcgctaccgaccgtccgatcaagaccttgcaggaggccgtggtgggagccgacgtattcttgggcctctccgtggcgaacgtattgaccaaggagatggtacgtagcatgaactccgacccgatcgtattcgccttggcgaacccgaacccggagatctcctacgccgacgcgatggcctcgcgggatgatatcatcttcgctaccggacgttccgactatccgaaccagatcaacaacgtgctgggattcccttatatcttccgtggcgccttggatacgcacgccaaggcgatcaacgaggagatgaagctggccgccgtctacgccatcgccgaccttgccaaggagccggttcccgacgtggtgaacgccgcctataagctgaaacgaaccactttcggacgcgactatatccttccgaaagcgctcgatccccgcttgctgacccgtgtatcttgcgccgtggcgaaagccgctatcgactcgggcgtgtctcgcaagacgatcaccgactgggagggctacgccaaccacttacgtgagatgatgggatacgataacaaactattgcgctcgttcaccgatatggcgaaagcgaacccgaaacgggtggtattcgccgaggcgaaccacgtgaatatgctgaaagccgccgccgaggcgaaagcggaaggtatctgtttcccgatcttgctgggcaacgaggagcgtctggctaagatcgccgccgaggagaatatcagtctggaaggtatcgagatcgtcaacctccgccacgaccgcgagacggaacgccgccaccgctacgcccgtatcctttctgataagaaggcacgtgagggcgtgacttactcggaggcttgcgagaagatggtagaccgcaatgcgttcggtatgatgatggtggctaccggcgacgctgacgctttcgtgacgggcgtatacagccgctactcggaggttaccaagatggcggagcagatcatcggcatccgcccgagttacaagcatttcggtgccttgaacatcctgacttgtaagaagggtaccttcttcatggccgatacgctgatcaaccgtcacccgtcggccgaggtattgatcgatatcgcccgcctgacgcacgacgccgtgaagttcttcgctcacgagccggtgatggcgatgttgtcttactcgaacttcggttccgacaagcagggcagcccgctgaaggtgcatgaggcgatcgacttcttgcataagacatacccggacatggtagtagacggagagatgcaagtaaacttcgccctcgacaagaagttgcgcgacgatatgtacccgttcaacaagctgaaagggcaagacgtgaataccttgatcttcccgaacctaagctccgccaacagcgcgtacaagctattggatacgctgggtatcaccgagacgatcggcccgatccagatgggattgaacaaaccgatccacttcaccgacgtagaaagctctacccgtgatatcgtgaacctgactaccgtagctgtcgtagacgctatcgttcaggagcagatcgagaaagaaggttgataggggggataagccctatcaatactatccccagttgtagagacggggcgtgccccgtctctacaactggatatatcaattctgatagctttcgatattcgctattaccttttgcgacaatcgctccatacattgctccgagtggccggagactttcggggtatatatgacattatcgaattgtgtcaaggtatccgcataattcccgatacctacctcatcgcataagaagaaattccgcttatgtgcgctaagccaacgttgtagatccgggacacggaaagtcggccctaccgacgtattgatcaatatcttcagattaccgaacaaacgaaactcacccgcccccagaagaatcgtattacgaggcaagcaagtgcataaaatatccacctccggcagcaactcccgcagaggcaggtaagcgataccggcggcctcggcatccggcttacgggtacggctgaaataatagacctcagcccccaagaaacgaagagcgtcagcgatcattctcccggtgcggcccaatcccacgatgcctactttttgcccgcccagctcatacgccttatgtctccactgtttcccgccgaaaccatgcaacaaacggaccagctcgctaatgacatactccacgactccctcatcaccatagtcgcggatacccaagaccgttatcccccgctcacgtgcggcggctatatccacattcgcactagactcgctatagagggtacagcacatcccgatgtatttgatattcgggcaagcctcgatcacgttcctccggatctgtgtattataagagacgagtacgcaatctgcgtccccgatccggttcacaatctcctcatccgtttccggaatgccggtataaaaaacaacctcttttccaagctccttcaaacgctccactccccatgtattcaacccggtagaatctaccactactattttctcaaacatatctcacattattaattaccatcttcaattaattatccctctcacaaagctataaataaaatagccgcaaagggtaaccttcagcacgacactcaataaaaaacccgcgaacgccccgaaaccagccttcaacgcatctccggacgccttgcctcccaaaagttccccaacgaaagcccccacgaaaggacccagcaagattccccaaggcggaaacacgaatatgccggccacggttcccacggcacatccccaatttccccacttggaccctccgctatacttagtccccagcatgggcgtaacatagtccatcgcctgtgccaacacgaccagcaatccccacacgaccaactccgtaaccgtaaattccgcataacccgtaaaatgcagcagccacaaagccaaatacgccaccggcggccccggcaagatcggcaaaaaacaccccgccaatcccaccaacaaacagataacgcctagtataaccaataagatatccatatatttcagtttttgggatatataaatagacaaagatacaaacatttcccacccttaactgttttctctaatgaggcaaaaagagaatagccatgggtttagccatggctattcttttttactcccttcggatacattattatatattctatgattggaattaagcgattcccaacaactctacctcaaatattaatgtggagaaagcagggattggacccgaggcacgattaccataacccaaactgtaagggatatagattatccatctatcccctacccgcatttcttgaagagccaattgccagccttcaatcacttgattcaagcgaaaggcttccgggcaaccccgtttccatgagttatcaaattcccttccgttaatcaacgttcccttataatgtacggaaacgacgttttccctattaggcgatacctggcctgtacccgcttgtattaccttatataatataccgcacggtaatgtctgggttccctcttccgaagcgatctcgtccaaatacaatagattcttctctttgtactcctcttttctactcatatatattacattatcttacatttagctccgcaaatgtagcaaatagaaatagaaatgcaatggcatagtaacacaatagacatgccaaacgttcaaatactatcattatatgaatctgattcccgctttttttatcatagatcaagaaaacataggaatccgcaaaaaacatgctataaaacataccacgtatggaataacgccgtatatttgtgtcgtaaaacataattgtaaagcaaatatggtaaaaagattgtttaaacgttacatcgatttgctagggtttcaaccttggacaatttgggtttaccgcgtgtggtaaacctcacgatgaaaaagaggatggtttaggttaaggttatcagaagtccgggattaggttagtaataggttaaaaggttaaaggtttaggttttcaattcattcgttactcggacttcaaaagttatgtgagatttagaacgtgtcgaaaggcatagatttattaattaaaaagaaaatgagctatgaaaagttttattagacattttttggatagttgcttgagatcactcgctgctatcggtcagtcggagttaacaaaatggggttacaataaataagtaacaccccattttaccgggaaggtgaacatttgattttttcaaaccataccgcggttgcttggcatcttgccagacaaccacttttttgtatccataccttttaaacaagatatcttagtttcattgagaaagtatcctaagttcattggcgaagtatcttaggtgtatggggcgatgaaactaagatacttttataactcatgcgcctatccccactgagtttctactacccgtctatatatttatagatattaactatttgacaactgtctaacaacatcttatttttgtcaggaagttaaaaacaattgttgtttctaaacagttttatttaaagattactttatctaaaattctttattgcgacataaaaactaaagttatggaagacaaaaaactaactgccgccaacgggcgccctgttgcggacaatcagaacgtacaaacagtggggccacgtggcccgatggtattacaagacccttggttcattgagaagctagcgcacttcgaccgtgaagtgatcccagaaagacgcatgcacgccaaaggttccggcgcattcggtacctttaccgttacacatgatatcacaaagtatacgaaagcggctattttcagcgaggtaggcaagaaaactgactgctttgtccgtttctccaccgtagccggagagcgtggagcagccgacgcagagcgtgatatccgtggattcgccatgaaattctacacagaggagggcaactgggacttagtgggtaacaacaccccggtatttttcttgcgtgatcccctaaaattccctgacttgaatcatgcgatcaaacgtgacccgaaaacgaatctacgaagcgaggataacaactgggatttctggactttgcttcccgaggccctgcatcaagtaacgattacgatgagttctcgcggcattccttactcttatcgacatatgcatggtttcggtagccatacgtacagttttatcaacgataagaacgaacgtatctgggtgaagttccatctcagaaccctgcaaggtatcaagaacttgagtgacgaggaagcggctgcgatcatcgccaaggatcgtgaatcccatcagcgtgatttgttcgagagtatcgagcgtggggacttcccgaaatggaaattccagatccaattgatgactgaagagcaggccgagacctatccgatcaacccattcgacctcacgaaagtatggccgcataaggacttcccgttaatggatgtcggtatcctcgagttgaaccgtaatccggagaattatttccaagacgtggagcaagccgcattcaacccgatgaatactgtcgaaggcatcggcttctccccagacaagatgttacaaggtcgtctattctcttatggcgacgcccagcgttaccgccttggcgtgaacctagagcagatcccggtgaacaagccccgttgtccgttccatgcctatcaccgtgacggagcgatgcgtgtagacggaaactatggagccgcaaagggttacgaacctaacagcttcggcgaatggaaagactctcccgagaagaaagaaccgcctttgaaagtacacggggatgtttataattacaacgagcgtgagtacgatgatgattactacagccaaccgggtgccttattccgtttgatgccgccggaagagcaacagttgttattcggaaataccgcccgtgcgatgggtaacgcccaactgttcatcaagcaacgccacgtacgcaattgctacaaggcagaccctgcttacggtaagggagtagctgaagctctaggaatcagcttagaagaggccttgaaagaagaccgataaagtagtaaggctacgatagaaagcgataaaagagggataaccccagtaatcctatggatgaacaggttatctcattcttttttagtaggataagagaggatatgccatgagaccccgatactgataagccctaacaaagctttcacccaccaatagccgactagcaaaagggaagtaatgatcgtagatagccacatgatagcgatcgtgataatcttggaacgcaaaggaatagccttatcttccacaaagcccttaatatgcggcccgaaataacgattgctcatcacccggttataaagcttctccgagctacggacataaaaccaacaagtcagtaaccaaaaaggagtggtcgggagcaaagggacaaagataccgatcgctcccaatatgagaaaaaacgttcctaacgtaatgtatatgatacgtctcgtcccgttcatcagccaaccgtatattccgcgatttgcttgaaaccattcaggaagtccgttatattcatccgtttctttccggcaagttgcaaggaacgcaagcgaagaaaaccgtccttcacggccacgtcgatatacgatttatgatccgtatggatagagccgaccgggaagttatgctccgccggacgtttctctgcctggtaaatctttaaagccagacgtttgccatcctcagagatcaattccgtccaagcggcaggataaggagaaagcccacggacgaaatcatagatcttcttcaccggctggttccagtcgatatgacaggtatccttgaatatcttcggggccggacgcaactcggcggcatccttatagaattcctcttgggggatagcgtctgtttttccatccaacagtaagtccacggtctcggtaaccaaccccgcccccatcgccatcaaggcatcgtgaacggtttctacatcgtcggtatcggcgatcggcagatgtctctgacggatgatcttacccgtatcgatctcatgcgtaagaaagaaagtagtcacgccggtctccgtatcaccattgataaccgcccagttgatcggagcggcaccccggtattgcggaagcaaggaggcatgcagattaaaagttcccagacggggcatattccagaccacctccggcagcatacgaaacgccaccacgatctgcaaatccgcccgcaaggcacgcagttcctccaaaaacgcctcatccttcaacttctctggctgtaagaccggaagacccaccgatacggcatattgcttcacggcactcggctgaagcacgctaccatgacggcccatcggcttatccggcatcgtaatgacacctaccacattatatccaccttctaccaaggcacgcaggctctccacggcgaaatcgggagtgcccatatatacgattcgtaaatcctctttcttcatgtacaataaattggatctgtttttaacaagttagtccccggaaaagttatcgaccaatacctcccgataggaattaaatatcttcgatttcgacataaagccgatataatggccattctcatcgaccaccggaagattccacgctttcgtatcgtcaaacgtctgcatgatctgatccatcggcgtgttgattacgatcttggccggggcggaaaccatgaacttcgatacatggaaacgattatacaactccggacggaacatgatattccggatattatccagcaagacgatacccagcaacacgccccgctcgtccacaacagggaaggtgttacgcccgcttcgggaaataacctttaccatatcgcccaacgtcatctccggagacaccatctggaaatctttctcgatcacgctatccgcccgtagcaaggtaagcaccgcccgatccttatggtgcgtcagcaactcgcctttctgcgccaaacgcatggagtagatactatgaggctcaaacataaggatcgtgatataggaactgatcgagacgatcatcaaggggaggaacaaatcatacccacccgtcagctcggcgatcaagaaaaccccggtcaaaggagcgtgcatcaccccagacatgatacccgccatacccagcaaagcgaaattcttctccgagatatacatcgtgaacgggaaataattagacgtatgcgcaaagataaaaccggcgatacagcccagatacaaactaggagcgaaaataccaccgcacccccctccggcattcgtggcgctggaagcgaataccttcgtaagcaagatcaaggtcaagaagatcaagaccccgaaataggtatcgttcagatcgtaaaacaaactcttgtccatgatatgcgagaactgcccgttcagcaacgagccgatcgtatcatagccctcaccatatagcggcgggaacaggaatatcaaaatactcagcatcaccccccccaacatgaacttcttccaatacgtacccaacttccggtacatcccttccaccttgttcatcacacgggtaaaataaagggataccaatccgcaaaaaacacccagcaagagcacgtaaggaatacgctcgatctcgaatgcctcggtctgagagaacttaaacatggcctcggtgccggtaaagatataagacatcgtagccgccgtcaccgacgagatcagcaaaggaagcacggaagtcatcgtaaggtccagcatcaatacctcgataacgaacaccaacccggcgataggcgccttgaagataccggcgatcgctccggcggcaccacatcccacgagcaacatcaacgtcttttgctccatcttgaacacccgccccagattagaaccgatagccgcccccgtcaatacgataggagcctccgccccgaccgatccaccaaagccgatcgtcacggaactggctacgatagaggtccatgtattatgcggcttgatacggctctttcgttgcgagatggcatacaatatcttcgtcacaccgtggctgatatcatcccgcacgatgtatttcacgaataatccggccaacaagataccgatcaccggataaagcaaatagaggtaatttacgccatcagcattgaaattgcccgtcaataaatgctgtatgaaatggatcagctgtttcagtattatggcggcggctgccgtacaaagtcccacgataaaactgataataaggatgaaatgcttctccttgatgcgcttttccctccacaacaagaatttatagaataaaccttcgtttgccattttaaatacctttacctgtaaacactgttttaactgtataaatgagaatcgttatgtccagaatcaaggacatattctcatagtataatatatcatattccaagcgctcgatcatctcatccacgctgccggcatatccatatttcaccatacccaacgaggtgattcccggacgtacgttatgcagcagatagtagaagggggctttcctcacgatccgctcgatgaaatatttacgttccggacgggggccaactagcgacatatcccctttcagcacgttccagaactgcggtaactcgtccaagcggtatttccgcatcacccgtccgaagggagtgatacgggaatcgtcctcggaagagagcaacgggccttcctcctcggcgttcgtgtacatcgtacggaacttatagatcatgaaaggctcgcccatgtatccgatccgttcctgactgaaaaacaccgggccgggggaatcccgcttcacccgccaagcgatatacaggaacaagggagataagagcaccaagaaaatcagagataacgtcttatccataaagagctttacattctgctcaatgggcaagaagttgttatccgtcacgtccaccagcggaacgccctttatcgccttgatctttacttgcgataatgaactggatttatccgccaatatcttgatcggccgtttatagcaatataacgaatacaggatatccatcaaacggttattatccaccgtctccaaggcgacaaccagctcatccacctttttctcctctacgatcaccggcaaagattctagcctaccgatcacacgatctccggcgaccccgcccttttcctccgtaccatcggagacaaaaccgacgatattataacccaaaccatacaggtcgtcggcaatacacgccgccttcttccccgccccaatcatcaatacattcaacgcccattccctgcactttatcttccgtaacccggcctgcgtaatcaataaccggggaatatacgtcaagacaaactgcaatccccataaagagaaaaacatatcataatacacgtgataagaacggggcaagtcattcagcactaaggcaaaaaacaagatcacgacaccgatcgacacgctcccaagggtagagaacaactcagtaagcctcgacttaccgaacggtttattataataaccggaaaaccaatataatacgaaccagaaaaacgggatcaatagctgccccttcaatgaggggatatgcagcaaaaaggccccgacggtatcaaacccttcatacaccgccacctcctcatagcgtatcaggttaaataataaccagactaccgacgacgctataaaatccgagacaatatattttccggcttgtacgcttttcttcatccttatctaattacctgcacaagcccaccggctcctaacttgataatgccggacggagcggccttgctcatatcgtcctgacgataactcacgatataatccacaccctccttgatcacctccgatacctcgctgaaattagcgggagaaggctcgccgcttacgttggcggaagtagagaccaaaggtttacggaagcgctcgcacaatttcttggagaactcctcgttcgtgatacggatacccacgctaccatcggctcccaatagatttgtcgccaagttcttggcacttgagtaaatgatggtcaacggcttatcagacacgctaatcaaatcccaagcgatatcgggaacatccgacacgtacctatccaatttagcctcgctgtccatcaagaccaacatagccttattgtctgtccttcgctttagctcgtacactctttgtacggctttttcattggtagcgtcgcaaccaattccccagatagtgtctgtaggataaagtattatgccgcctgcggccattacttcgcaagcttttttaatatcttccgtcattgtattttataatatttaggcaaatgtacgaatcattctcctacttcaaaaaaataataacaaaaaaactattttctttaagccataccggatataccatatttaatttctaactttacgggttgaaatatattgcggaaatctcgcctttgtcatacggtagattaaggatgacaaggtatccgtagtatcaggcaagcaaaaaagaaaaaaacaatatataatgattaacaaatggaactttcaaaccccatcagaagaagagttacataagagagaccaattggtggctgaattaggattcagcccggtgatctgtctcttgctcgttcaacgaggtatcacttcgatcgaagaggcgaagaaattctttaaacccagcttgaacgatttgcacgacccgttccttatgccggatatggataaggcggtgaggcgcttgaacaaagccttggggaataaagaaaagattttgatctacggcgattacgacgtggatggaacgacagcggtatcgctcgtcttcaagtatttaagaccttactcgtctaccttggatttctatatcccagatcgatacgacgaggggtacggtatctcttacaagggtatcgattatgccgccgagaacggcgtgtcgctggttatctcgctggattgcggtatcaaagcgatcgagaagatcgagtacgccaaggagaaaggtatcgactttattatttgcgaccaccatatgccggacgccactttgccggacgctgtcgccgtattggatgccaagcgctcggattctatctatccgtatgagcatttatcgggttgcggagtgggattcaagttcatgcaggcgttcgccaagagtaataatttcccgttctcggatctggagaagttgttggaactgacggcggtcagtatcgcctcggatatcgtcccgattacgggagagaaccgcatcctcgcctattacgggctgaagcaattgaacagcaaccccagcctcgggctgaaagggatcatcgatatctgcggattgaccggaaaggagatcacgatcagtgatatcgtattcaagatcggtccccgtatcaacgcttccggccgtatgatgaacgggaaggaggcggtggaactgctactgtccaaggatagcgccagtgcccgggagaagagcgagagcatcaaccaatataatgaggaacgccgggaattggacaagaagatcaccgacgaggcgaacgctgtcatcgacgaagtagagaacatggatgaccggaaggcgatcgtggtgtataacccgggatggcacaaaggcgtgattggtatcgtagcgtcccgtttgaccgagaagtattaccgtccggcggtcgttcttaccaaatcgtccgagttgatcaccggatcggcacgttccgtaacgggtttcgatatttacaaggcgatagagagttgccgggatttattggagaatttcgggggacatacctacgccgccgggctttcccttcgggaggagaacctagaggcattcaccgagcgtttcttgaagatcgcatccgaggagatcataccggaacagatgatcccacagatcgatatcgacgctatcttggatttgaaagagatcaaccagaagttcgtgaacgacctaaagaagatgagcccgttcggaccggacaaccagaagcctgtattctgctcgcttggcgtaaaggactacggcaccagtaagctcgtgggtaaggaactggagcatctcaagctggaattgatcgacggaaactcaagcacccccatgcacgccatcgctttcggcatgcacaggcacaacgaccatatcaagggtatgaagcctttcaacatctgctacacggtggaggagaatacctacaacggcaacacctctatccagctgatgatcaaagacatcaaacccgacgatatatgaggaggacaggtggacgtctaccataaaatattagagaagtattggggataccctgcttttcgccccttgcaggaggatattatccattccgtctgtgccggaaaagatacgcttgggctgatgcctacgggtggtggtaaatccatcacctttcaggtgccggccttggcgatggaggggatttgcatcgtcgtcactcccttgatcgccttgatgaaagaccaagtggagaacttacgccgggtcggcatcaaggctacggccgtttattcgggcatgagccggcaagagatcatcacgcaactggagaattgcatcttcggggggtataagttcttatatgtctccccggagcggcttagtacggatattttccgggtcaagatggaggccatgcaggtttgtctgctggtaatcgacgagagtcactgtatctcgcaatggggatatgatttccgtccttcttacctcaatatcgctgagatccgggacttattgccgggtgttccagtattagccttgaccgccacggctaccccggaagtggtgaatgacatacaagagcgtctgcggttcaaggagaagaacgtatttcaaaagagcttcgcccgcaaaaatctggcttatattgtccggaagacggaggataagttaaatacactcgtttatatattgggaaaagttccgggtacggccatcgtatatgtccgcaaccggaaacgcaccaaggagatcgccctcatgctgcaacaggcgggtatctccgccgatttcttccatgccgggttaaaccgtgacgagaaagaactgcgtcaggcccgttggaaaaacaacgagtgccgggtaatcgtatcgaccaacgcttttggtatgggtatcgataagccggacgtgcgattggtcgtgcatatggatatgccgggatcgttggaggaatattatcaagaggccggacgcggggggcgtgatgagaagaaagccttcgccgtggctctttgttcctccacggatagcgccaagctaaagaaacggctggcggatgagtttccggacaaggagtttatctatcgggtctatgaggcgttgggtaattattaccagatcgccgtagggtacgggttagatacggtacacgatttctcgttaacggatttttgttccgcttataagttctctttattgcaagcgcatcatgccttgaagatccttgggctatcgggctatatcgagtatacggaggaggtggacaacgcttcccgcctgatgttcacggctacccgtgacgagctttacaggtatttaagtgagaacaagcgaacggatgaggtgattcagacgatcttgcgttcttacaccgggttatttgcggattatgtttatatagatgagagcgtaatcgctacccgtgcgagagtaacgcctcacgaggtgtatgagaccttggtaggtttatccagataccggatcgtaaactacatcccgcataagaaaaccccgttgattatctatacccagacccgggaggaacagcggtatctttccataccccgctcggcgtatgaggaacgcaaggagcgtttcgggaaacggatcgagaaggtgctggaatatatcaacgaggagcgggtatgccgtagccgcatgctcctatcctatttcggcgaggaagattccgccccttgtggctgttgcgacgtatgcttatcgaagcatgaatcacagcttatgaattgggaattcagcgctatccgggaaagtctcgtaaaggtattggccggggaatcccctatccccgtgaaagagcttattgagaaattacctttccctcaagagaaaagcctcacggccatccgctttctggcggatcaagatccccgattcacattaagcgacggctatctatcgcacgaggattcagcaaaatagcacgatgcccatcgtaagctccttagaatgcccattgttagcttgctagaatgcccatcataaggagcttacaatgggcattctaataaaccaagtatcaccgcttataattactccgattagatacttgtttttccgtcgggaaatcagtgggaaccttttgggttaccttgccggtagcggcccattccgcacctcttaacaaggtgatctggaagccggcgcattgcatagccggacaattctctaccgtttcccccgcatgccctagcatcgtatggaatatacgggcattcccataatcaaccgtaaagatcaacggctcctcacgaccggagcctccggtctccttgtccgaataagcggtatacaagcaatcctttatatttcccgggccacgcatacgatcatataactcatcctgcgcatgtttccatttattcggcagccccttcatgatcggatgctcatggttccgggcattcagcacatactcatgttgcttgccatgagagccccccacgcccgccgagctatcctttatcaacttaccatcgctccaatatacatagggtcccgctttctcatcccggttctcccaaccgcccaaggcacaaatcttattgtattccggccagttcacgaaggcgttatcagcggcatgatagaccacgacaccaccacctcctcgcacatattccaagaaacgacggtttgtctcttccggccaagcatccccattataatccagcaccaccagctcgtaaggactgaaatccaagacaaagccggacatatccttccccgcctccggagagaccgcgaaatccacggagaagcgtcccgagttctccaatatctgtttaagcaccacatggctcacctgccaattatggttattctgccccgttattaataacgtcttgatcggcttacgggccgacatgccacagacaaccagtaaagcggccaaaaggaaaacgatcttcctacaaaatacatgtctcatggtatgaataagatttaagtaaactataaattatccgtctttatttaataacaaagggaagcggcaccgaatagccccggattctccagcttagagaaacgtatcttcaagttcttgatagagttcggataagcgaaatccttcaagtcctcatacatgctctcctcaaacaactcatgggcggcggtcaccgagcctccgaaaacgatcatctctggatctactgtcaataccacaatcttgatagcggcggccacatgtacgcccaactgccggtaagcctccagcgcctgctcgtccttccgcatcgcacgggtgtacatctccttcccatccacgccccatacgttcatgaaataggaaccgctacagaaatattccaagatctgtccttggtagggaatcatgccaaattctcccgagccacaattagcgtcggccaacagcttgccattctggataattccaccccccaaacccgtacccaaggtgaggcccacgaagttatcaaccgtctttccttcgccaaagatacgctcacccagagcgaagcaattcgcgtcgttatccacataaaccggcacggagaagcaagcctccaagatctccttcaaatgtacctcctcccaatgcgggatattcaccacgttatatacgatccccttctcacgatccaccacgctcggcacaccgataccgatagctaccacactctcgtcccacacggaacggatcacctctatcaaagcctccaatgtctcctcgcaatccgcagcgtccttgggagtcggggcgctcccctgagccactaatcgatcccctacgatacggccggcacgcatattcgtcccccctaaatccactccgatataagcgtttttcttctctacactcattctttacacgatattaaattagattatactcccacaaagctaacaaaaaaggcaatgttacgaataacatcaccttttaaactggtaaatttaatacatctatgctttttattttccccggcgtcaactccatccagcacgtataccgacatcgcctcacgcctacgttcgcataggccaacgtcgatatacgtgtgaggcaatgccggtatacgtgtaagacggcaccattataactaccgcatcaagcgaagaacaaaatcaataattgcgccgtaagcacccgcaaaaacatggtcaatgggtataccgttgcgtaacctacggaaggagcgtcgtttccagccgtagcgttcgagtaagccaaagcgggcggatccgtcgtactaccggcgatcaagcccattaaggtgaaataattgatcttatagaaatagcggcctacacaaccgatgatcagtaaaggaaccgtcgtgataatgaaaccataaccgatccaagcgaatccgccgttgttcacgatcgtatccacaaaaccatcgccggcgctgatacccacgcaagcgaggaagagggtgataccgatctcacgcaacatcaagttagcgctctgggtcgtataggtaaccagcttataacggtaaccaaaacggctaatcaagatcgccacgatcagcggacctcccgccaaacctaacttaaccggttgcggaatgcccgggaacgtaataggaatactacccaagacaataccgagggcaatgccgataaagatcgtgatcaaattcggctcgttcaagcgcttcatggagttacccaataccttctccacattcgagacagcggtttcggtacccaccacattcacacggtcacccacttgcaacgtcaggcccggcgtagcgaccaagtccacgcccgcacggttgatacgggtgatattgataccatataatttacgcagtttcaactgtcccagcttcttgccgttcaactccggtttcgtgatcaagatacggcggttgataaactggctctccatacgaatccattgcttgcgctccatatcgatctcctcgccgatgaatgtctttacggactcggcatcttgatctgtcgtgatcacgaaaatcttatcatcctcattcaagatcgtaccggcggaagcgatctcgatctgcttgttatcattacgccatacacgggaaatcacgaaatccagatgatccatcaaaccggataactcccctaccgtcttaccgaaaaccgcagggttctttacgaccagcgagatcggtttcgcctcattcgtatgcgaggcatcctccttattcaaatcgtcattctccttatcgaaattcacacggaatacgtaacgtacgaaaatgatcgaaagaataataccgatcacgcccagcggataagccacggcgtaacccaaggcgatcgtattatcagaaaccccgtacatatcggaataagcctgctgagccgcacctaatccgggggtattcgtcaccgcccccgataaaatacccaccatcgtaggcatcggaatacctgtcacgaaatgcaataccaaagccgtagccacgccaaggaagacaattccacaggctagcatattcaacgtgattcccccctgcctaaaagacgagaagaaacccggcccgacttgcatacctaccgaataaacaaataagatcaatccaaattccttaaagaaatgaatcacattgtggttaaccgtaaacccaaaatgccctaaaataatacctacaaacaacaccaaggtaatcccaagcgaaatcccaaacacctttatctttcccaactgaatgccggcggcaatcacgaaagatagtaaaaggatagaatgcccgataccttctccccataataagtcgtttatccaatccatgctaaaatctttaaaaatcttattacctattaataaagacgcgaagttaggcatttactttgtgttttacaacataacacctatatttaccttttaaattaaaatctcatgaaaaagatatattacattttatcagcattgttcctttgcgtggtagccacctcggcgcaagaagctggaaaaacggtagttattaaaaccaatgtaggtactatgaaggccatcctgtacgatgatgtgcctaatcacacccgtactttcatcgaacgggcaaaacggggggatttcaacgggaccttattcacccgtgtcctgccggagtttatgatccaaggaggagccccggattccaagaacgctcccgccggtgctaaatgcggctttggcgatccttccgccgagataccgcccgagatcaacgagaaatatttccataagaaaggagccttggccgctccccgccaaccggacgatatcaacccgcaaaagaaatcggatatgtcgcaattctttatcgtgcaggggaaggtctatagggaaaccgaactggatacgttagagcgtaccgccaactatccggcccggcaaaaggccctgaaggagttttatgcgccggtacgtgcggagctgaatatgataaagatgagtaacaaacgggagtaccagaagcgattgagagcgatcaacgcccagatagactccgttattcaagcaactcccgggcatttgctatttacggacgagcaacggaaggcttataccaccgtaggcggttgccatcatctggacggcacctatacgatcttcggggagctgacggagggattcgacgttttggatcagatcgccacccagccgaaagaccagaatgaccgtccgaagaaagacatccgcatccaaagtataacgatcgaataattcaccactcctatgttaaagagagatttcatcatggtacagatcgaggaactgggcaaagtgatcgcccagatcatcttcaatcgtaattccaacgatggggcacgcaagaaccccgagttaatccaatccgtctacacattcttaaaactggataacgatttcttgctgaacacgcctatcgacggtatccgcacttatctggacggtgatgattcgtgcggcctccaacgcatggagctggcgagcaagaccttgctggaagaaagtttccttttgccggaggcgcaaggtaaaaaactccgggcaagagcgaaagagctattggaatatatccaacgcaacgacactacgttctcgttggaacgagtggcgttgctggaagagataaataactattgaatagattgcggatcggtggtagggccttccacgactagaaggccattctcattgattcgcattttatcgatgaatacgacccgctcatcccctgtcttctgggtacgcccgtggtaaacgcaatacatttgttttccgtccttcgaccaagtaacgctattatgtccggtacccgtgacgataccgcctttttccacgttcttctccagcaccggattattagatgccttctcaaacggtcctaacggatgttcggacacggcatatcccaccgcataatttgccccgccaaaataattagcggaatacatcatataatacaagccgttgtgacgtagcatgaaagagccttccgtccaacgacgtccgacctcccctttggtaaccgagcgactttcccactcactttgcgcatcatccaattttacgggtggacgcagcagaagtacgggttccccaattacgtgcgtaagatccggagcgacctccaccccgtaaatccagctttcctcaacggagtcgaacatgcctttcttctttgcctcatcggcgatctcgctttctaccggatgcttatagcaacaacgggaataatagagataggtacggccatcctcatcctcgatcaagtttccgtcgattacaggatatcccggatcaaacaaaggagcatcggccaattccttaaatggtccggtcggcttatccgacacagctacgccgatacggaaattttcctcctcgttggtcggattcttccgccaatccgcactgaagaacatatagaacttcccgtcacgctcgtacacttccggcgcccagaaattagcgattgcccaagaatcgggcgtattgccccgataaacctgcccttccgacttccaatggatcaaatcatcggaagaataggcgcaaaaaccgtctacagccccggcaccggtaccatacatataataacgtccgtccgaggccaacaatacgtatggatcgccaaactggaccgacaaaggattactgtacgttaattccggctcttccgcagcagacttctttcccgtacaacccgcattcaaacacataagaactcccagacaaagggatattcctattttcataccacttttcatttttcttatttattggattctaaattatacactccttccgcacaacgttccccgtcgatagcagcggatacgattcctcccgcataccccgctccctcaccgcaagggaaaagaccttttaccgtgacgtgttgataggtatcccgatcacggaggatacgaaccggagcggatgtacgggtctctacgccgatcatggttgcctcgttggtcaagaagcctctagagaccttaccgaaataacggaaaccttcccgcaggcgactggtcacaaattccggcatccaaaaatgcaacggagaggccagcagacccggcgtatacgaggaaaccggtaaatcgaaagagttcttcttccgcatgaaatcatccatgcgctgggcgggtgccgtttgcttcatgcctccgtttagccagcagacctcttccagacgttcttgaaaggccatcaacgctaatggggaatccgcatctaccttctcgccattccgaagataaagctcctcctgccctaccagttcggaataatcttccggacggatctctaccaccatccctgagttagaccagcgggacccccggttggaaggcgacattccatttaccacgacctgcttaggtccgctcgccgcaggaactacgaaacctcccggacacatacagaaggaatagacgccccggttattcgcttgcgtcacaaaactatactctgccgcaggaagatatttcccacgaccttctttccgatgatactggatttggtcgatcaattcctgaggatgttccagacgaacaccgaccgcgatccctttcgcctcgatctggatctggcgttcgtataaatagttatagacatcacgggcggaatggccggtagctaagataacaggcccgtaaaagctctttcccgtattcgtctcgatgccgatcacctcgttctctttcatgataaaagcatccatacgggtctcgaaatgtacctcacctccgcatcgcttgatttgctcccgaatattctcgatcacacgggggagcttatccgttccgatatgcggatgggcatccgccaagatagagggactggccccaaactggcaaaagatattcagtatcttatctaccgagcctcttttcttactacgggtatacagctttccatcagaataagcgccggcaccgccctcaccgaaactataatttgattctccgttcaccttatgctcacgactgatcaaggcgatatctttcttgcgttcccgcacgtccttacctcgctcgacgatgatggggcgcaaacctaactctatcaagcgcaaggcggcgaacagacctcccggaccggctcctacgacgatcacaggtttccctgccgagacatctttatactctatcgattgatattccggctcgctaggcatctcgttcatgaaaacacgcagtttcacgttgacaaatatcgttcgctggcgtgcgtctatcgaacgtttcaatacacgtacggcccggatatttttcggagcctcacccgtctcacgggctactacttgccttagcgattgctcattaacagcctcttccggcaatatcctgagttgtaattcttttatcattgtttattatatattaaccgaatagttgccgaaaggcttcctccactttctttacctgtacgatttgaatcttgctcttcgccgtatcgaaaccttttagattattatgcggaatgataatccgggagaaacccagcttctccgcctccaagatacgttgctcaatacggttgaccggacggatctctccggacaagcccacctcgccagccatacaaacacccggctcgatgctgatatccaagctagaagaaaggatggaactgattaccgccaaatcgatagccggatcattcactttcaaacctccggcgatattcaggaaaacatctttctggatcaacttaaaacccgcccttttctccaatactgccaataacatattcattcggcgtaaatcgaatccggtggcgctacgttgcggcgtaccgtaaaccgccgagctgaccaaggcttgcgtctcgatcaagaaaggacgtaccccctcgatagcggcggcgatggcgacaccgctcagtccctcatgattctgggttaataataactcggatggattgctgacctcacgaagcccgttctggcgcatctcgtaaatccctagttccgccgtactgccaaaacggttcttgatgctccgcaggatacgatacatataatgctgatcgccctcaaactgcaacaccgtatccacgatatgctccaataccttcggaccggcgatactgccttccttattgatatggccgatcaataagaccgggacaccgctttccttggcgtatttcaagatagcggcactacactcacgtacttgggaaacactgccgggggaagattccacgacttccgtaaagatggtttgtatggaatctatgatcatcaagtccggctggatattggccgcttgcgtaaaaatctgttccagatgcgtctcgcataggatgaaacagttcggattatcatgcgataatcggtccgcccggagtttcaactggcgactgctctcctcgcccgagacatatagggttttcaagcctgtcaagcccaacacggtttgcaagaccaaggtagattttccgattcccggctctccaccgatcaagaccaaagagcccttcaccaagcctccgccgaggaccctatttaattcatcatcttttaaatcgatacgggcctcctcttccgtcgttatatcacgcaataacaccggacggatcttattgccctccataataccgggaactggccgcttcacggcaggctcctttgttacgatctcctctacataagtgttccactccccacaattcgggcatttacccagccatttcggggaatcagcgccacagttagagcagacatatacggtttttgttttcgccattctatcctgaatttggcgtaaagatacaaaaaactacttttcccctaccacaacgatcttctttccgataccgcagcccttcttaatttccgggctacctttctccttatacaagaatccgcggaacataccgccactgttataaggcatggcgatatttcctagtttatccacggcgatcaagccgccgttgccggcgttcgtattcaattccgtatggatgatataatccgccgctttctctacgctttccttaaggtatttatagcgggcacacacatcgaacgctaccgcatgacggataaaatactcgccatgccccgtacaggagacggcgcaactgttattatccgcatacgttcccgccccgatcacgggcgaatcaccgatacgcccccaacgtttcttgaacataccgccggtactggtcccggccgttaagtttccttgcttatccagaacgacacagcctaccgtaccgttcttcttactttcttgctttaacttctcgatccactccatcgtcttgggcgtagcgaaatacatattgtcttctaccatttccaagccttgttccttggcgaactcctcagcaccggctccgctcagcatgacatgcggagattttgtctttacggcataggcggcattgatcggatgcttcacgtgttttaagccagctacagcgcctgcgcttaaatccttgccttccatgatggaagcgtccaactcaaaagttccctccgccgtacaggtagcaccaattccggcgttaaacaacggatttccctcgaagtaattgattacggccatcaccgcttccggcccctcgcctcccgcagaaaggaccttatctccaatcattaaagcggagtccaatgcggcgtaatattgagccgacttaaccggatcttcctccaatccggccatcgcccccgcaccaccatgtaccacgattacatactcccggtcttgcgcaaaagcaatggatgacaccatcaaagccgtcaaggctatcatttgttttaacatgctattatatttaatcatttatacaatgctcaaaaatagaacaaatatctgaattatcttagagacatagacttatttcccgatttttatccgtacatttacctcgaacggtaatctcttaaataataacattatggaagaatacatcgattctatcataagagtgggaaagatattgatcggaagcataatggtcgtgttcgtactctggtacatcgtaaaggatattgtcaaggcttatgggaaagattcgcatgagccggattaaaaaaagtgccgtggcgatatgaccacggcacttctcttcattatatcatagagagctatttcattcgttcgtataccataccggtcccggctggctgcccatgacgaactccaatgtcgccccgctcatgatttgctcgtgggtgatataactcttatcataaggttgtccgttcagcttcacggattggatataaatattctccgcagagacctcgggagccaaaaccgtaaaggtcttgccattacctacatgcatcttcacttccgggaacaacggggagccgatctcatattggccactgatcggatcaaccgggtagaatcccatggcgctaaacacaaaccaagcggacatctgcccacagtcctcattaccacaaataccgtccggggcattcagatacaaatcatgtaatacctgagccacgtatttctgggtcttccaaggctggccgaccttattatataagtagatcacatgatggctcggctcatttccatgcgcatattgaccaatcatgcctgtactaaagataggcaattcctcatccgatttggggacataggtaaacatactatccaatttctcggcgaaacgttccttacttcctaccaatccgatcaaaccgtccagatcttgcggcacggaccagaaatattgccaaccattgctctcgcaaatatcttccgtataatcatcggggctgaaattagcggcaaagtttcctttctcatcacgaggctgcataaaggaagttgccggattgtacacattatgataattctgtgaacgtttaaagaattcgtcggcgatctctttcttacccatcttctcagccatcttagcgatgcaataatcatcgtaggcatactccaaggtcttcgataaagaccagttctcccattttttcggatcgctataagccggtacgtagcccaacttcttataatcgccgataccccgatagtcatcccggttggctgtcgctatacaagcctccagcgctttctcggcattgaaatcaccgatacctttcagataagcgtctacgataacgggcaccgcatgataaccgatcatcatattcgtttcccagccataaaggttccataaaggcaaagccccgttctgctcatagaacttcaagaaacccttgatcatatcattcgcccgttccggctccgtatacgtaaacaacggatgggaggcacggtaggtatcccataaagagaaagtagagtaattcgtccatccgtccgctttatggatttgctgatccgggccgtaataagaaccatccacgtcgctatagatcgtcggggcgatcatggaatgatacaaggccgtatagaatttcaccatatcgtccgtattccggctcttcacctcaatcttggaaagctgtcggttccaattcgcgctagcctgcgcttgatagtaatcgaaatcatccttcggggcttccgcacgcaaattctttcccgctccctccatgctgacaccagagattccggtcgtgacaaggatttcctcatccttcttcgtattgaaatcgaaacgggccacataggccgtaccgatccaacctttttccttggtcacgatagaagtcgtatccatatgacaagccacgaaaggcttagagaaacgggtctcgaaataaacatgctgcaagggagaccagccttgggataggcggtatccacggatcgtcgtagagtctaccacctcgatcttggaatccaaggtaaagtcccaattcatcgccttcttcaagttcaagaataccgaagcctcggcctccgggaaggtataccgctggataccgcaacgctcggtagccgtaagctccacgttaatgttataatccttcagcaatacccggtaatatcctgcggaagccgcctcgtcattatgcgagaacgtggaatagattcctaacggcgccggggcctctttataaggacgggtcacgggcataaaagagatatcgtataaatcgcctgcccccgtaccggaaaggtgcgtatggctaaagccggcgatcgtcgtatccggatagaaataccccgagatgcgatcccaacccggcaaaccgttatccgggctcaattgtaccataccaaaaggaacttgggctcccgggtaggtattgccggtaaaatccgtaccgatcatggggttcacatactgcgagtaatccgcctcctgtttcttttcaggcgtgcaggccacgagtgccagcaaagagaccgccaatatagacatgtgcttcatgttatgcaattcgttttgagtttgagcaaacatacataaattatttcgaaagagaaacagtttacggggaaaactttctattttcatcggggtgaaaatcttttttcattatgatgagaatctattttcatcaaggagaaaatcttttttcatcaagacgagaattcggtggaatcctttaactttgtacaaaaactacgataacatggaagataaaacatcgacacttcgtttgatctatccccaatggcaaggtgggatcgtgaatcattggatgcccgaccttcctgcggacgacgcttccagagggtattacctaggagctcaattactcaatatcctcgctcccccaagtccccagaaaaccgtggaagtacccatctcactagatataaacgatagagaaacggatctaggggtcagcgcccgcaaggttattctgaaacaaacaaaagcagccctcgaattactgcacgaaaacgctccagaaaagattgtcaccttagggggcgaatgttcggtaagtgtcgtacccttcacctatctggctgctaaatatccggatgatatagccattgtctggatagacgcacatccggatataaacttgccgtatgacgagtataaaggatatcatgcgatggcccttacagcctgtctagggatgggtgatgaagagattcttcaattattaccgggaaagttcaaggtctcgaataccttaatcgtaggtttacgctcgtgggatgagggcatgaaagaacggcagaagaacttaggtataaaaggtttatcaccagaggaggtggcgaaggatagttcctccatcctcaagtggttaaaagggacgggcgcatccaaagttgtcgttcacttcgatatggacgtaatcgatccggcggatatgatagcgggagtcggcgtagagcctaacgggatgaaaatagacgaggtcgtacgtgttatcaacaatatagcatccaagtatgatctggtaggtcttacggtagccgagccgatgcctcgtatagccatcaagctaaggaatatgctggaccggttacccttattgaaataataaaaaagacgtagcccttaaacagagttacgtcttttttatattacattattataactttcgggatttattcctcattattatcttcctcattctcctcgtcttcttcctttggggcttttttcacgaagaacgcactcaactcatacaaaccgtagagcggtaagaatacgatacttaacgtaaacggatcactacttggagtgatgaacgccgcaccaactaacaagccgacaacagcatgccgtctgtatttatgaaagaacgagcggtttagcagccctatctgagataatagccaagataccaatggcatctcaaatacgattcccatcacgaatatcaacatcaagaagttatccatgtaagaatcaagggatacctgttccgtaatggcggcactcaactcgtaagtcgccaagaaacgtagtgtcatcgggaacaccaagaaataacccaccgagcatccgataaagaacattatcgttccgaacaagaatacccaacgtacatttttcttctcattctcgtaaagagccggacttacgaacttccagatctcccacatcaaataggggaaagtcaataataacgccaaccagaaagaacttgtcatatgcgtgaagaactgggaagccagcttgatattgacaatgttcacatggaaagtatcattacaaaagtccgggagaaaagaaaaatgagaactaatcttacacatttcccgatagacgatgaaatcggagctacacggggccatcacgacattatcgaacagccacggcattaccgagaacccggctatagcaaaaacaaagagcgctaaaatagaacgaaataaagtccaacgaagttcttctaggtgatcccagaatgacatttcttcttgttgcatcttcctttacttcttttccgtatcgtctaatttgatatcgtcttccaatccttttacaccgtccttgaaattcttcacgcccttaccgatacctttcatcagctcaggaattttcttaccaccgaaaagcaataacacaacaatggcgatgatcacgatctcgcctgtacctaagtttcctaaaaatagtaattcattcatgatattataatattagtcattaatattctcgtttctatgggggcaaagatacaatttgtaatgaatagtagcctcattattccaaatttattacctttgcaccgtcttaaaaaactgaaattagaaaaaaattagaaagatgaaagcgtacgtatttcccggtcagggggcacagttcgtaggtatgggcaaagacctctacgataataatcctcttgctaaagagatgtttgagaaggctaacgagatccttggtttccgtatcacggatttaatgtttgccggaacagacgaggatctgagacaaaccaaagttactcaaccagcgatcttcttacactctgtcattctcgcgaaaacattaggtgatcaattccaaccggatatgaccgcaggtcactcattaggagaattctctgccttggtagctgccggagcattgtctttcgaggacggcttggtattagtttccaaacgtgccatggctatgcaaaaggcttgcgaggcaactccctctacaatggccgccgtattagccttgccggacgcgacggttgaggaaatttgcgcgagcatcaaggacgaggtagtggtttgcgctaactataattgcccgggccaattggtaatctccggctctatccccggtatcgatcaggcttgcgagaagttattggccgcaggcgctaagcgtgccttgaagttgaaagtaggtggagcgttccattctccattgatggaaccagctcgtactgagttggctgccgctatcgaggctacgacgatcaataaaccttcttgcccggtttaccagaacgtaagcacgaaagccgagacttgcccggaaacaattaagactaacttgatcgcacagttaaccgccccggtacgttggacccaaagcgtacagaacatgatcgccgacggtgccactcatttcatcgagttaggcccgggtgccgttcttcagggattggttaaaaagatcaataaggaaatgactacggaaggtatgcaataatttacctttcaatgtaataggataaaagtccgaaaaggatggagggtgattttcctcgtcttttccggacttttttatatacgatgatgattcgaaaagatcttgaatgctaaactaatcaaaggccaacgttgttttatactataaacacaattcagaatatagaaaatggaaacaatacaacagaaaaataggattatcctactttggccggatggagcgcccactagtaatggattggccggcgtagaattggaagatgccccgaatgccatatccaatatatcgaacccttccctattggtttatccggcgacgaagccgaatggcaaggcgatcttgatgtgtccgggtggcggactttccaagatttcgatcggacatgaggggcgtgatatggccgcatggtttaacgcgcaaggtattacttatgccgtattgaaataccggatgccgaacggacatagggaagttcctctggacgatgttcgccaaggtctccgcatcctccataattactcggaagagtggaagattacgaaggtcggtgtcatgggtgcctccattggcggttatatcgccgggcatgccgcaatattcggggtagacgacgcacgtccagatttccaaatactcctttatccggttatcagtatgctacctcatttaacgcaccttaaatcgagggaacggctattaggagcgaatcccacgcatgaggaagaggaagctttctctttggaattgcacgtaaactcactgacacctcccgcctttatagcgttggcttcggatgacgaggcggttagcccggagaatagcgtgctttattatctcgctttgctaaaaaacaaggtgtccgcctccttgcatatttatccaaagggcggccatagttttgggttccgggacaacttcgtatacaaacgtcaatggactgacgaactggagaaatggctaagcacgattgagtaaatctcaaaaaaacggtgccacacaaataaatgcgtgacaccgaaaaagtatatataaaacagaccaagcaggttcgctatttagcgttccaccaaagtggagtagtcgtcaagtccgggccgcccaaaagctggagagcttgcgcataacccgcttgattattcgtttggatattcgccggataacgataacgtttcgggtagaaatcccaacggcattccttagaggtagcgaccgtcaaaggaacttgattcaatgggttgtaatccttctctaccgcttggttctcgaagaaaggaagacctaaacgacgatgatcgctccaagcctcttccggcaaccaaggaacttgcgctatatatttctgggtgataatcttcgtaagggcgtcattattataagcgccattccgatagatcgagttatggggatattcatacgtacggctttttacctccttcgtataggggtccgtataacggatcgtatatgatttcgcctctgtcgtatggtcgaaagcgacggaagtacctacacggttgtatttctgagacgataggtaatcaccgacttggctcaataagccatgatactcaaaactagccgtaacaccagactcataattggatttagctgttcccggaactttccagcctttcaccgcagcctccgccaataagaagtaactttcccacgggccgaagaagacacgcttattggtgctcattcgatattgtttcgatatagagggataattataattcttacctgtcagctcacttaccagaccggctttcacgtcccattctccggcgacccaagtgccccacgtatatttcggatcgatcgtcaacatattctgggtattatccgccggattcttcaagtgaaccggcttcacctcgctggccgcaccgatataatcggaataaaccacaccatcatcccagcccactacactaaacaacttcggggcacggggatctacatattgaggtataccgtcgaaatagaaaccggcgcacggatcattcgtcgtcagcgggaagtgctggttcaaatataaaccttgataatcgtatggattcttcaaatggctttttaaggagtccggcaacggaaattcctgtccacccaaaccaactaccaagttcttaaacgtcacggacattgcctgcccgttccaaggacgagacatcacgctcgtcaactcatcccacccctctttctcctgcacggaagcgatatcggttggctcggagataaatgtcttagaggcggcatcctcaaattccgctctcgccaaggcaggatcgacagccgagatacgcatcgccaaacgcatacgcaaagagttggcgtactttttccatttcgtaacatttcccgcatagaaagcatcctcgttagccatagcggacatatccaaggaggggtctaacgcagactcagcttcccgtaactctttcaatataaattgatagatagcttctacactatcgtactcagccggtacaccggagaaagcggccaacgcagggatcggcccgaaaccgtcagctacttccgagttcaagtaagcacgccagatacgggacatctggatcacgttcttataataaggataggtatccgcctcgccattggcaaccatctgctctcctaactggatcgctttggtcacttgattcagccaacctacggcgtaatcattactcaagtagatcgtactataatcattgttatccgtaccgatcgtaaaaccacttcccctattgaaacgggaagcacggtcccagtacaagataaagatacgctcggctatctctgggttcatctggtctcccatgatagaggcattcaggaaccattggggcttcaccttatcctctcccacaagattcgggtcctcattgatctcctgaaagtcattacaggaagaaagaagagcagccaccgataccaatccggtaaaaagtatatttcttgttttcatcttcatcatttttatcgtaattcaaattatcatgtattccattagaatcccacggttacgttaaacgtataggaacggctggtcggcgcggctccattctcgaatccggtagcgttggtattcgtggcggcaacggactcggggtcgatacccggcaagttataatggatcatccaaacattgttacaagtagcggatagacgtacacgctggaaaggcgttttcttcaacatctgtcgattgaactcgtagccaaaggtgatattacgcaaacggacattggtggcgctataggtataaacctctggtaaaccataatttccggtagacccaatacgctcccaatagttctggggagtgacggcgaccgtattctccgcataaccactaccctgttgaaccacggtattcggtaccacgaattcggcacgatcaccattcaccactgttccggcggcgttaccccgggtatacaggttggaggctgtcgccgaatagatgctaccaccgatacggaagtctatcaagaagctcaggttaaaacctttataagagaaattattggtccaacccatcatccaatccggactctggtttcctactttcgacttctcggtagagatcaaaggcaaaccatcatcacctacgacgatctttccatagtgaggactattctcatcggtcacacgcataaaggtctgcccgtagatctcaccataataaccacctaccggagctacgatctggatagcgtcgaacgtctttatatcatatagattcacgccctcgtataattccttgatcttattccggttcaaggagaactgcgccgtagagctccagctcaatccggcgggattgtctagaatcgtaccgttcaaggagatctccaaaccctcgttctgaatgttacccgcgttaatcttacgggaagcatagccggagaacgggtccatcggtaaatccagtaactggcgggtagcgttggacttataccaagcggcatccaagcctaaccggttattgaagaaacggatatcgaaaccggcctcccatgatttaatcaactcactacgtacatccgagtcgtaaagtaccttacccggtttcgccgtcgtattcccgttggggtccttgcctacagagtagaagttatataattgatacgggtccaagtcgttacctacctcagcgaaggaggcacgtaccttagcgaaagagaaccaatccggcatgcttccgccaatcttcggcaacatatcggagatcaccgcagacaagctgacagacggatagaaataagagcggttggctttcgacatcgtagacgaccaatcgttacgtgccgtaacatccaagaacagataaccatcccagttcaactgcaacgacccgtacaaggaattcatacgacggcggatcaactcggaagtgaccgtcggcttattcacgccattattcagcgagaacaagttcggcaccaacaactctccggcagaagcgttcatcttattacgttgctggagcatcaagttaccaccgaaagtaacgaagcctcccagccgatcgatcaagttatccttccgggccgtagccaagaaactgaagttattctcatagaaggtctccgatccctcggtatacagacctctcggactggtattaccaccggcatatactttctcgctcttcgtcgtggtataataatccgtaccacctctcaactcaatatcgaaccaatcggtcggggcatatttcaaggagatatttcctaacaaacggttacgggtatcctcgttctggcgataacgggtcacccaataagggttctcctgcggattcttggaggcatcataccaaatcatattgccttgctcatccacgtcatcctcaaactcacggatattcaaggaacgaggcaggttatagatcgtattgaaagcgttcgagggattcacgccctgaatcgggcggttatgcgcgttttgattgatataattcaccttggcatctactttccacttttccgcctcatccaagaaagtggtggcacgcaaggtaatattcgtcttgtttagttttgagcgtggggtgatactagcatcgtcggaacggtttacggaggcgaataccgccgtaccctttatgttctgctggaagctgacaccctcgttaaaggaggttccggtgcggaaaaaagcgtcgatattatcataagtatgcagagggatttggttgcctctccaatcggttaccatttgtcccatggctttcggtccccagctaaggcgggattggttatcgtaaacgcccacggagccttgtccgaagtcgttctgtaaatcaggtttcaggaaaatcgtctcggcggtgataccggcgttgatcgtaataccgagtccctcgttcttacgtccggacttggtagtgatcaagatcacgccgttaccggcacgtgagccataaagggcggcggcggaagcacccttcaataccgtcatggactcgatatcttccgggttgatatccgaaaggccgttacccatgtccgctccggagttaccccatacatcatccacgccaccggtgaagttatccatcggggtaccgtctacgacgatcaagggctggttgctacccgtcaaggagttgttaccacgaagtacgatcttagaagaccctcctacgccattgcttgaacggacgatctgcaaaccggaaaccttaccggaaagggagttcgccaagttcggctcacgggaggccaagaggtcatcccctttcaactcctgcatggcataacccaaggctttcttatcccgtttcatacccaaggcggtcaccaccacctcatcgagtttctgggtatcttccacgagtttaaccgtaatctcggactggccagtatacgggatgtcttgcgaggtataaccgataaacgatatctgtatgatatcccctttcttcacgttatccaaggtaaaatgtccgtccaagtcggtcatagtaccattggtagttcctttcacgattacggacgccccggtaacgggtcctaaggcatcctcaactattcccgacacctttgcgttttgctgtgaaatgtcaaccctcggaatcccggacataggcgtggcgtataagtttcccgagaacccaagcgcccctaccaacaggattaagctgactggtctgaatcttttcaacataactactgttttttgtttatttttctagacaatgttttagtttttgcgtcaacaaatgtcatttatcctgtataaacataaaaagggcagatatgttttgagtttaacatatacaagaggtaactggtgaggataccgcaactactctctccttacagacaaaacgaataagagttatccttactaacatccataaaaaattgatttacagaaattttaaccaaaggataaccaaaccgtaaaagaggcaggaagccgttagttattcacttcagaagccaataaaagttccagtttacccatacaaatcatcaccacaaaaaaaagaaggcgtaccgacatttacatcgatacgcccttttctcgtaagaatattattctctataatttccgaatcagttacaatacaaagttgtcaaaagacaagaaaagacaagaagtagatatctttatttcctataaagtctaataagcatgaatagtaatcgtcagcacatcaccattcttgtctgtgacacaaaaaacagccgagtcccctttacttgcactctgtgtccaaattaacgcaaaacgtccagacccaccgggattaaattgaatatagtcactaccactcattttttgccacaagaaatctccagtagaaggttgagtaaaacgaatttccactgatttcccagcttcaataccaattgaattactagtcctaggttctccatccgcaaaaagcgctagattaccactgtcttttacataataaccatctatttgggcattgcaaaaaacactaattgttccaaataaaaacaataccattaataactttctcataactgtaaaatttaaaagtttaacattaaaaacataaatcctcacgttgaatgatgatacatcccaacatgaggattcctattattttgcagtaaaaatactattcatattatttcatattccaccacaaagaagttgtcgtcatgttcggaccaccaagtctttctaaagcttggttatacccttccaagttattggtttgaagaactgccgggtaacgaagacgcttcgggtagaactctactttacattccttgcaagtagcaggagttaacaacacttggttagttggattgtaagcagcctctacagcttgattctcgaagaacggcaaacctaaacgacggtgatcagaccacacttccaaaggcaaccaaggattctgagcgatgaacttctgcgtaatgatcttagtcaatgcatcattattatactgaccattcttatagatcgtatttttaggatactcataagtcgttgtcttattctgtttcgtatatgcatcgtaatagttgatcgtataagccttagcctctaccgtatgatcgaaagctacagatgttcctacacggttataagccttagattgcaaatattctaagagtttatcggaaacaccgttatattcaaaactagcggcgatacctttctcataattatcctttgcgctacccggaacattccaaccataaaccgcagcttccgctaacaagaaataactttcccacgggccaaaccatacacgtttgttcgtgctatgacggaacttatcagccaaagaagggaagttgtagttataacttgtatagtcaccaactaaaccggccttatcgttccagtttccggcaacaacggtcgtccaagaatatttcatgggaagttttacttccggcgcggaaactttttgtccggtcagcacatccgtataatctcccgcaatcaatgttatctcatcctttacctcggaagcggcacctatataagaaggataaaccactccgtcatcataccccggaatgctatacaactgaggcgcacgaggatcgatatattgtgggataccatcgaaaaaatagcccgcacaaggatcatttgtggttgttgggaaatgcaggctgacattctggcctaagtaagtataaggatctttcaaattggatttcaactcatcaggaacaggaaattccacaccgcctagtcccactacgagattattgaaagtagtagacatcgcttggttattccaagttcttgtcatgacacctgtatacggatcccatccatctttctccgcaacctgggcgatatcatccatagaggcgataaactcacccttggcagcatcctcaaactcagcttgcgccaaagaaggattgaccgcagtcaaacgcatcgctagacgcatacgcaaagagtttccatactttttccatttctttatgtcaccaccaaaaaacggatcatatttggacatcgcactcatatcaatgctctcatccaaagaagcgaccgcctctttcaactctttcaatatataggtatagatatcctccaccttattatattctccaggaacaccggtaaaagcagataacgccggtatcgggccaaagttatcagacaattcagagttcaaataagctctccaaatacgagccatattcgggatattccgataataaggataggcattatccacatctaatttgattttctcctctccgacctctatcgcttgattcgccttattcaaccaacctacaccatacgagttcgaagtcaagtataatctattatagtcatcattatccgtaccgattgcgaaaccgctaccccgatcaaaacgagcagcccgcttccaatacaaaataaaaatacgttctgctatttcagggttcatttgagcatctccaatggagccattcaagaaccattccggttccacttgctccaaatcagccttattcgggtctttgttgatatcctcaaagtcattacaacttgtaaccgttgtcaatgaagcgaccgccaaggctcctaatataatgatatttttcgttttcatattatctcctttctattagaatcctacagttaaattaaatgtataagaacgatttgtaggcgcgccaccattctcgaatcctaccgcattcgtatttgtagctgccacagattcaggatcgatacccggcaaatgagaaacaatcatccatacgttattacaagtcgcggacagacgcaacttttggaacggggttttcttcaacaaattcttattgaacgtatatcctaaagtaatatttctcaaacggatattcgtagcgtcatacgtaaacacctccggcaaaccatagtttcctgaagaagcgatacgctcccaatatctttgaggcgtaacagcgacatcattcttcacatactcatcaccttttttcatgattgagtttggaaccacgaaatcagcacgatcaccattcacaaccgttccggcagcgttaccattcttatgcaaagaagaagtcgtcgccgagtaaatctcaccacctatacggaagtcgatcaagaaactcaaatcaaaacccttataagagaaattattcgtgagaccaagcatccaatccgggttctgattaccgatcaactctttatctgtcgtaatcaaaggaagaccatcttcacctaccacgacctgcccattgtggcgaacaaatttctgtccataaatatcaccatatttaccaccttcggtagcggcaatctgtaagacatccacagtcttgatatcatagacagtcaccccttcggttaattccaagatcttacttctattcaaagagaaatgagcttgcgcatcccagttaaacccactagcagtctgcataatagcaccattcaacgaaagttcgaaaccttggttctggatattacccgcattcacttttcgagattcatatccggaaaaagcatccatcggaatattcagcaactgattggtcgcatttgtcttataccaagcggcatcaataccaaaacggttattgaagaaacgtaagtcggcaccaacctcccaagacttgatcaactcactcttaaccgaagagtcaaacaaggtacttccggcagaagccatactattaccattagcatccttagaaattgtatatacattatataactgataaggatccaaatcattacctacctcagcgaaagaagcacgcaccttcgcgaaactaaaccaatcaggcatacttcctccgtttttctgtaccatatcagagattacagcagataagctaacagaaggatagaaataagaacgattctcttttgacatagtggatgaccagtcattacgtgccgtaacatccaagaacaaccaaccatcccagttcaactggagagatccgtacaaagagttcattttacgctgggtcaaagaagatgtaatagaaggtttatcaacaccattattgacatcaaacaaatcaggaaccaacaacgttcccgcacttgcattcattttggtacgtttctgctgcatgatgttaccaccaaatgtaacaaaaccacccaatttgctgatcaaatcatccttacgcgccgtagccaagaagctaaagttattctcatagaatgtctcagaaccttcagaatagctaccttccggcttcgtattacctcctgaatataacttttgagtagtcgtggtagtataatagtcagtacctcctctcagctcgatatcaaaccaatccgtaggagcatattttaaagaagcatttcctaaaatacgattacgcgtatcgtcgttctgacggtattgagttacccaataagggttctcctgtggactattacttttatcataccaaaccattttcccttgatcatccacacagttctcaaaatcaagaacattcaaagagcgaggcaaattataaacggttgaaaatgcgttggatgggtttataccaatgatcggacgattatgggcgttttggtttacatagttcaccttcgcatccaccttccatttcttagcctcatccaaaaatgaggtagcacgtaacgttaaattcgtcttattcagactttgctctggggttacacccgagtcatcttggcgattgaaagaaaagaacatagaggttccattcacatcttgctggaaacttacgccttcattgaaagaggtacctgtaccaaagaaagcgccaatattgtcataagcggccattggcacttgacgtccgtcatacgtagtaatagtctgtccttcaatcctcggaccccagctcagattggtttggtcattgtaagcaccaacagaaccctgtccgaaagaactttgcagttccggcaacataaaaggagtatccgccgtaactccaaagttcacattgatacccagaccatcattcttctttcctgatttcgtcgtaatcaagataacaccattaccggcacgagaaccgtaaagagcggcagcggaagcacctttcaatacagacatagactcgatgtcttctggattgatatccgaaagaccgttacccatatccgtaccggagttaccccaagcatcatctacaccaccggtgaagttatccatcggagtaccatctacaactaccaacggctgattagaacccgtcaaagagttcgcaccacgaagtacaatcttcgaagaaccgcctacactaccactagaacgaacgacctgcaaaccggaaaccttaccggacaacgcattggcgatattgctctcgcgagaatccagcaaagcgtctcccttcaactcttgcatcgcataacccaaggacttctcagatcgcttcatgcctaaggccgtaaccacgacctcatccaatttctgggtgtcttccgctaatttgataacgcctaccggttggccggtatacgtaatttccatggtggagtaaccaatgaatgagatttggattacatcaccattcttgacaccttccaaggtgaaattaccgtccatatcggtaatcgtaccattggtcgtgcctttcacgacaactgacgctccggtcactgggccgaaatcatcttccactgtacctgttactttcccgttttgctgggagatagaggtaccttgctcaacaggtgcgatgttggcatacatgcttcccgagaagcataacgcacccgcacatagaattaagctgacaggtttaaagtttttcaacataactgatggttttattgataaataattagacaatgtcttggcgaaacatttgtcttttaaaattattcacatacatacactcactcctgagttctagcgtaattaagttcaaataaaaaatgggctaactatcggagtcctacatgaacttttcttaagtagaagttgttttatttagttggcgccaaaatacctagcacattttatatcggaggcaaagatatgaaatattcattatattgtgttattataattaaataaatctttccttatttttatgttttacaatataaaattagaaatataaacggttttaagttaaaatcgacttgagttcatgtagaactaagtatctgcggtaagatatgaaatcacagtaattcaggcgttttttcagaatataaaagcaagccagcttcattagcaaagtaagttaattaaaatgccaaagtaagttaacttacttcgccgatgaagttaacttacttttattagatatcttctattgaaaaagaagtataatctctaaaaatctttctcattcgccatataccacatattaaggaacgaggccttcgtgatattcaccaccttgtcccaattaatccggtcggcatggtcgctcggttgatggtaatccggatgcccgtcggtatgataccagataatagggatacctatctttgcgaaggaaccgttatcactccctcctaccgggttatcccacggacgataatccggtgccagattcaagttgtatttcttgatatcgttcttcagccaatcgccgaaagcagggtgcgcctccgtatagaaataaaccacatgggtaggcttcgcctcgttattgttacggccgatcatatcgaaattcaaatatcctttcacgttctttatctctggaaaagactgaacgaaggctttcgatccgagaagccctttctcctcaccgtcccagaaagcgaatacaacggttcgctccggttgctggcccgtggcaaggaaagccctcgctatctgcaaaacggcagagactccggaggcgttatcgtccgccccgttatagatctggtcgccatccagcatcgggtcgatacccagatggtcatagtgagcgccgacaatcacgatctcgttcgggttcttcccctctatcttacccaatatattattcaaggatagcttctggaaaacaccggtctgcttgatagcggccaccgagtccgggtggacttgccaacgggctcctcttttctggcgttccagatggtaagcctcgaacggatggtaataggaatcgcccacgggatcgatacctaaagacttcaagttcgccacgatataatctcccgctatacggcctccacggaaaccggcctcacggccctccagatcatcatcggccaagaaaccgatatgcgcctcggcggtcgatctatttatcacgtccaaacctttcttctccggactttccgcccaaagagccgtacttaatgccagcgacattaagagtaatcctgcttttttcatcgcttttgtgttcaaatgattattgttttagctttttcattcacaaatataagtaatttccctgatacgcgaaggagaaggaaaggaaagggcacaaaaaaaggctcacccggccgtattgccaaaggtaatcctcatttcctatctctcaccattccgttttgaacggaggtaagagatgacatctaatttatttcttactttaattctttacttaaaaaagacgcggtcttttagttcttatccgcatctacactcatttcgctcataaggcgacggatctcagcgtttaatcgctgactcatggcaccattgccagctgactggtaacgatctgcttgataacgcaacatcgctaaagcacgaaggcttttctcattttctctcatcatcataatctttttgttttacgcttcccacgcttggaaagccagttaataaataatcctaaaacgatctttctttcttaattcgttacaaagataaccattttatccgaaacaatgttgtagaacataataaaatatttcattttttcgattatttatgaattatgcaaataagtctaaatacgccggggattactccaccggcgttaattcacctgtaacagagtctattacaaaccctcttaccgttatatccgacggaatcagcggatgattccgaatttgctccacggtctcgtgcacggaagcctcggaggtctcgaatccccgcaaccacgactcgaagtttataccgcaatatcggatcatatctattcgttcctgcgggattccccgctctttcatcttttcgatcatctcggagctattcatgtgcttggctccacaatcggtatgcccgattatcattacctctacaaccccaagctcgtaaatcgccaccatcaagctccggataacgcttccgaaggggtgggatatgatcgcccctgcgttctttataattttcacgtctccattcttgatgcccaaggaggcgggtagcaactcggtcagccgggtatccatgcaagacacgatggcgatcttcttatcgggatatttattcgtgatatacttctcataccccttgttctttacgaactcacgattatagcttaccaattcatcaatcatagcgtttgtgatttagcgttattaaactgtttatttatataacatcgaaatgtcttaaagcgttcatgacaccatcgtcatctacggagtcggtcacgtaatccgctgcctctttcacctcgtcgccggcgttacccatggctaccccgatcccggcgtggcaaagcatggccatatcgttgcctccatcgccaaaagccatcgtctcgtggagcgagatcccgtaatactcgatgatcttatcgatccctaccgccttactgctcccccgcggcacgacatccgcaaatagcgggttccagcgagtagcctcgcaatgcggcaagacggacatgatacgttcttcatggccgggagagaaaaaggctatcagctggtatacttccttacccccgttgccacgcaaaggacgcaagggaggatgagggaagtctagcatgtcgtaaagctgtcgcacagaatcatccacgtagttctggtaaatcccatcttcctccaccaaggcgcacgggaacgcctcctcattctcttgatagcggatcaacgcctctatatcccccgacgggatattatgtttatagataaccttatcttttccggccaagcaatatcctccgttcaaggtaacatagccatcgaactcttgcgtcccgaggttattgatagattgcaactggcggccggtagcgatgaaaaccttgattcccttttctcgcaacaggtccaaggcccggaccgtggagtccggtagtttatgcgtcttgaaacttaccaacgtaccgtcaatgtcaaaaaatactgccttaatcatacttatacctattatcttcttttaatgacaaagatacactttatttgttacatttgtattttcatttccttcatcaaataatagatatagttttttatggaatacagacaactaggaggttccggattatacgttccggcactttgtttaggtacggctacttttggtggcacgaatggttttgaaggttggggacataccaaggtggaagaggctacccgtatggtcaatctttgcttggacgccggggtgaatctattcgatacggcggatgtctactccaacggtctttccgaggaaatcttgggaaaggcgatccacggattgaggaatcgcctcttgatctccacgaaggcgactttcaacctaagcccggagagccgtaacgccatcggttcttcccgtttccatctgatacaggcgtgcgaggcgagcctgagacgattgaacacggatcatatcgacatttatcatatgcacggtttcgacgcaaataccccggtagaggagacactccgagccttggacgacttggtgacgagcgggaaggtccgttatatcgcttgctcgaacttctccggctggcacttaatgaagtcgctttccgtatcggagcggtatggatggagccggtacgtggcccaacaggtttattactccttgctgaaccgggagttcgagtgggaattgatgccgctaggcatcgaccagaaggtgggcgccattatctggagccccttatccgccggatgtctgggcgggaagtaccgccggaataacccgatcccgacggacgggcgtgtcgctcgcggaggaagcccgatacctgacgaggctacttcttacgaacgcctgtacgacatcgtggaggtattggaacaggtagccgaggagaccgggcatagcgtagcccaatgcgccttgaactggttattgcaacggcctacagtaagcagccttatcataggtgcccgcacggaagagcagctaaggcagaacctagaggccgtaggctggagcctcagcccggagcaggtgaagcgcctcgatatggcaagccagacgaccccgatctacccgtattggcatcaagcgcagttcccggaattgaattctcaattgaggttctagacggaggctagagaaagcgtatacacctcgggatgcggatagcacgaaagtccgcatcccctaaacacccattttcatccccttaaacgtatcttggttaagacgttttttatacttttgtaggctgttaccaactaaatctatcgtatgaggaaacattttctacttttcttgctttgtctagccacgaacgccagcctgacggcccaagagacccttcgggagaataacggggaacctacactcgtggaacgattatcgaacggagagatcaagatcaatagcgccgagatgaacttccagcttttcacctcggccaacgctgagtttgtcggaaaggagctagacggtatgaacttcaagctgaaccgtgtccggctggagatcaagggggatgtaggcaagtggctggggtatcattaccggcagtcgttcaacaaatactccgatccctattcgctcgacaacctctcctcctcgctcgagctggcttacgtgaacctgaaggcacggcataatctcaatttcacgatcggcaagcaattcgttaatttcgggggatacgagtattacgtcaattccatccgggtacgagagtttagcgagttcaataatttactgaccgcctaccaagccggtatctcgggtaactggcaagtcaacccggaccacgagctttgtttccagatcgtgaataaccgcaacggtaacgacgaggacatctaccctaccggacttcccgagggtaccgccaaggccaagataccctttatgtacacggtcaactggaatagctattatctggacaagaccttgcaactgcgttatgccaccgccgtcggacagcagacccgcaagcgctactcctattatttcacctgtggcaacacctatgagaaaggcccgttgctaacgtacctcgacgttatgtacacccgccaagggatcgaccaacatggggtcgtcagccgtctgcccggcacgcctcataccgccatgaacaccgaatacctatcaattatcggcgacgtggattaccgtgtccacccccaatggaacgtttacgtgaaaggggcgtacgagaccgcccgggtgtataagagcaacggtgatttccggaaagggatgtaccgccgttcgtggaacgcgcagagtagcgtggaattcttccccttcaagcaactcgaccttttcgtattcgtcctatacacctaccggggcgttatcctagagaaagccgccacgcaaatgggagccatagaaccggatacacaccgtatatcgctggggctggtctattcgatcccggtcttctgacaaaccgcgcatacggtagcgcaggcttgcagatatggtagtacagacttgtagatacgttcgtgcaaacttgcagatacgcttgtgtaaatttgcagatacgttcgtgcaaacgtgtagatacgttagtacggatttgtagatacggtagcgcgggctgacacataaggaagtacaggccggcacatacggtagtacaggtccgtattgccttatgtgcagcttcccccatccaccccataaaaaaagcggtgccttccgtttccggagacaccgccctcattctataataaaagacctgttatattaagcctctacatcccaattctcggcagccatacgtttgtagctacgcagacgccatttagcgttctcctcggcggcggcaaacaactcagcggcctcggccggatattgcttggctacggaagcgaaacgaacctcacccttcaagaagtcttggaacttgctccaatccggctccttgctatccaaggtgaacggattcttgccctctgcctccaaagccgggttgtaacgccacaagtgccagtaaccgcatgctacggcttctttctcctcagcttgcgacttacccatacccttcttcaaaccgtggttgatacaaggagcgtaagcgatgatcaatgaaggaccgtcgtaagcctcggcctcgcggatcgccttcaatgtctgggcttggtcggcgcccatagcgatctgagccacatatacgtaaccataagtagtagccatcaagccaaggtctttcttacgtaccctcttaccggaagcggcgaacttagcgatagcgcccaccggagtagccttcgaggactgaccacccgtgttagagtaaacctccgtatccaataccaagatatttacgttcttgccggaagcgatcacgtgatccaaaccaccgtaaccgatatcgtaagaagcaccgtcaccaccgataatccattgagaacgttttaccaagaagtgagacaattccttgatctgagcgcaaaccggacaaccctccttgatgccttgctcaacgaatgccatgatttgcggagccaattccttcgtcttctcggcgtcgttctggttagcgatccaagcggcggctatttccttggcctcagccggagcatgctcgcccacggtgatctgttgcaacaagccttccaaacgtttacgcatcttctcgttcgccaattccatacccaagccgaactcgcagaagtcctcgaacaaagagtttgcccaagcaggaccttgacccttctcgttcgttgtataaggagtggaaggtacagaaccggagtagatagaagaacatccggtagcgttagccaccatctcgcggtcgccgaacaactgggtgatcaacttcacgtacggagtctcgccacaaccggagcaagcgcctgagaattcaaacaacggagtagcgaactgtgagttcttcacgttagacttgatgtctaccaagttttgcttagaagaaacgttagccacgcagtagttccagttatcggcctcagccaactggccttccagcggaaccatagacaaagccttgttgcccttgaatcccggacagatatcggcgcagttaccgcaacccagacagtcgagaacgtctacctgcatacggaacttcatacccttcatagcagccggagccttcacgtccaacatagcgaagctagcgcccttctgctcctcgtcgttcaatacgaacggacggatagaagcgtgaggacaaacgtaagcgcattggttacactggatacagttcgcctcattccaaaccggaacgaaagcggccacgccacgtttctcgtatttagcggttccttgcgcccaagtaccatcctcgatgcccttgaatgcggaaaccttcaataagtcgccatcctgagcgttgatcggacgaactacctcgttgatgaaagcgggatcgttgtttacgacagcctcatcatccggaaggttggcccaagcgggatcaaccgtcaattggttgtactcgccaccacggtctacagccgcgtagttcttgttaaccacgtcctcgcccttcttaccgtaagacttaacgatgaatttcttcatctgctcgatagccaagtctacagggataacacccgtgatacggaagaatgcggactgaaggatcgtattggtacggttacctaaaccgatctccaaggcgatctgtgtagcgttgatataatatacagtgatattcttctgagcgaagtaacgttttaccttattaggcaagtgcttagccaactcctcagcgccccaaacggtattcaacaagaaggtaccgttctcacgcaaaccacgagtcacgtcgtacatgcgcaaataagcctgaacgtggcaagccacgaagttcggggtattcaccaaataagtagaacggatcggatgatcaccgaaacgtaagtgagaacaagtgaaaccaccggatttcttagagtcgtaagagaaataagcctgacagtatttatccgtgttatcaccgataatcttcactgagttcttgttagcgcctaccgtaccgtcggcacccaaaccgtagaacttagcctcgaacataccctcaccgcccaaggcgatctcttccttctgaggcagagaagtgaaagtaacgtcatccacgataccgatcgtgaactggttcttcggcatcggcaacgccaagttctcgaatacggacaggatctgagccggagtcgtatccttagaccccagaccataacggccacctacgatcaccggagtatcctcctgaccatagaagcagtcttttacgtccagatacaacggctcaccgttagcacccggctctttcgtgcgatccaatacggcgatacgcttagcggtcttaggcacggcagccaagaaatgcttagcggagaacggacgatacaagtgaacggataccaaacctaccttctcgcccttagcgatcaagtgatcgatagcctcacgagcggcctccgtaacagaacccatggcgatgatcacacgctcagcgtcctcagctccgtaataatcgaacaaaccgtatttacggcctgtgatcttggaaacctcgttcatatattcttctacgatagcgggaactgcctcgtagtacgtgttggaagattctctgtgttggaagaaatgatccgggttctcggccataccgcgagcgaccggtctctccgggttcaaggcacgggcacggaactcggccaaggccttctggtcgataagcggagccaagtcctcattctccaaagcctcgatcttctgtatctcgtgagaggtacggaaaccgtcgaagaagttcacgaacggcacacgagacttgatcgtagccaagtgagcgacaccggccaagtccataacctcctgtacggaaccctcggccaacatggcgaaacctgtctgacgggcagacatcacgtcttgatggtcaccgaagatacacaacgcatgagaagccaatgtacgagcggatacgtggaaaacgcaaggaagcaattcaccggcgatcttgtacatattagggatcataagcaacaaaccttgagaagcagtgtaggttgttgtcaaggcacccgcttgcaatgaaccgtgaacagcacctgcggcaccaccctctgattgcatttcctgtaccattacagtctcgccgaaaatattcttacgtccggctgcagcccattcatctacatattcagccattgtagacgacggagtgatggggtaaatcgcagccacctcgctgaacatatacgagatatgagcagcggcctgattaccatcacaggttaaaaatttcttctgttttgtcatagacctataaaactattagtattaaaaaatatccttactcaatatagaaaaccgaacaaccaaagcgggatcatgttcccctccccgatctcggtcttatcaacagcatagtacatatccggattgttcttcactttcatgctttcctcgatccggaaattatacatcgtattcaccagaaagtgggcgttcttgtttccttcattcagcttattgtctttcagtagttggttataaaagaacgactcacgcaccgccccggcatttacctccatcggacggatggggtacatcaggttcgagttatacatatataccttggagggcttcttcggaaaggattcgcccaccggatacagcatattcatcaaacgagcatctgtcaaatacttgatatagttcatcacggtggcccgggatgtctcgatatccttgctcaactgactcacgtttggggtacaaggagcgctcgtagccaataagtagagtagtttgcgtagctttggtaggtagctttgttcgatttgttttatgtataacacgtccacctctagcatcatgttcatggtcttcagcagattctcggagaagttgcgcttttccaagaagaacggatagaaaccatgatggagataatcttggaaataagccatcggccttacgaccgagcaaatacgtttggcgatttcctgatgattctctactacctcatcgaacgtgtacgcggaaaactggttccccgacatcaagttcaagaactcacggaacgagaaccccctgaggttatacgataccaccttgccggacaagtccgggttctcctctttcagacgcatcaccgacgagccggagaaaacgatcttcaagtcctcgaaattatcatagcaataccgcaactctctcgaccagttggaatacttaaacacttggtctatcaacaacacctttccgcctttagcccgaaactcggcggcgaaatcaacgagtgtgcgttccgtaaaatagaaatgatttaaattaatgtataagcattccttattatcggcaccaaaatattcacgggcatagtctaacaagaaagtggtctttccgactcctcgcgaacctttaataccgatcaaccgatcctcccaattgatctcatccatcaatccccttcgtaccggagaatacagatgctctaccagatatttatgtgttttaaagaatgcttccacctacataattggtaattgaaaatttggaattaccgatgcaaagataaacatcttttctcatttgcaatgcagagattgcaattttattgcaaaaagtaaagttcaaactaacaattgcctatcaacgtattctgtctcgtaaagacggagcgcactccagtccttacgaaacaaaagatattattcaatgatcgagatccatccgtaagtatccggctcgtcgccatactggatggcacgtaacttatgatatagtttctcgcaaacaggacccggtttgccatctttggcgataacaaaagatttgttctcgtccaaatcgtcgatttgcgagatcggagcgataaccgcggcggtaccacactcggcagcctcgtcgaatgtagcgatctcctcgaaaggaaccggacgacgctctaccgtcaagcccatatcctcggccaattgctgcaagctcttgttcgtgatcgaaggcaagatcgagtgggattgcggagtgatatagctattgccacggattccgaagaagttagccggaccgcactcatccagatatttcttctctttcggatccagatacaatacggcggcgtatcccttggaatgagcgatctcgccggctaccaagctagcggcataattaccaccgaccttgatcgtacctgtcccgttaggagccgcacggtcgtactcacgaagtacgcataccttcgagggctggaatccacccttgaaatacggacctaccggagtgacaaatatcataaacatatattcgggagccggcttcacacccacctgagcgcccaagccgatcatcagcggacgaatatataaagcggcaccgctctcataaggaggaacgaaacgctcgttcaatttcacgaccttacgtacagcttcctcgaacatctctacaggcaactcagccatcttgataccccggctggaagattgcatacgtttagcgttctcatccatacggaatacacggatcttaccgtctttcccgcggaaggccttcaagccctcgaaagactcttgtccgtaatgcaagcaagtagcggccatgtgaatattgataatctcggatgaagaaacttccaactcaccccatttgccgtcacgatagtagcatcttacattgtagtctgtcttgatataaccaaatcccagctcagaccaatttaaattttccatatctatacaatttgctgtaattagtttaaaattaacaaattacactgttaataatatcgctcaaaagcaaaaacgcccatagccgtcgctatgggagattttgtgtaccgcaaatatacgctaatttatatatagttcggcctataaactaaaaaaagcaagcggaaggctacatttcggcctataacgaattataccaatctatcacttggtcgaactcattctccaactcttgcgctgggaaatcaagggcgaccggatagatcaaacacatccataaggaaggcgaatcggacaacttacggtaaaaagaaaccggtaaatccggtaaagtctccgtcggatcggtcatcaagacctcaaatatcagttgatagggatgcgagtaaatcacccggtaacggtgatggtattccggaccagtcaagaatgagtatcttggaatggggcgtatatcttgctttctatcctccggttccgttgtttccggatcgatctcatcttcttccaataaatattctacttggctatcctctgctcccgggaattctaagtctggagtctcttccatggcctcgatctccccaaaatccggaagttccgagaaatgtattcgttgaagccctgtatcctcctcggaaaaacagataatctccgggctgaaattccggttctgccgagaccacacctcataatccccgataaaatacacccgcttcttcgcccgggtaaccgccacgttcaggatattgctatttacccaacctatcgcaccagttgaagaaggttggcatcccaacaggaagataacctcctcggcttcttttccttggaatttatggaccgttccgcagttggcagtctcccaccccttaaatttacctttaagcccactatactcctccgtattcaagacggctttaaccgcagccttaatgcctttcacaaccgtggtgaagggggagatcacatataatttccgggtatcctctttctcccggtgttttcccatccacgccaatatcaagcgcaagcatacctcgccttgctccgccacgtaatgatcattattccctttagcgctagtacctttcttaccgggcacatcgatccataaggaatgatctagcaacaattgacttttctcctcgtctttcaccgcatctttcattcccagaatcatcgtatcgtcgtacgacacccggttggagatgctaaacataggattgatacaacgacggtgcacgaccaacggacagcctacccacgtctctccaatccaagacccataacggtttatcaaatcggcgaaaccttgcacggaatgggatttcgagaggtaagaagacaaggatacgataccacatttcttttgatagagagtcatcaacgtctcatcggtggtgactaccggttccacttgtttcgggtctcccacgatgatcgctttctttgcccgccacaaagcgcctaccgcacattggggagcggcttgcccggcctcgtccacgatcaacaatcccaattgctccctacccatgtactccagcatcttctgtacggaagcgaatgtggtagataccacaggcaccaagaaaaacaagctattcaacacatgtgagaatatcaattctttctcctccggcatatatttattatcccaaaaggccaacagcgaataaaggttgcaacgccatttgtaggaattgatcacaaaagagccatgcaggaccaaagcttgataaaatagatcttcccttgctttgtcgaattcagcgttcttcaaaggattcgaggactgcatcttctcgtccgccatcctaaatacctcttcgttacaagagaccgaccgccgcaatcgctccactattcgatattgcttcaagaactcttgttgagcgatatcgaaagaagggaaacggttcttaaactcccgcataaccttctcattgtctcttttaggactcatcttggaaacaaacggccttaataccatttcgctgaaagaacggatattatccccttttcctaaacgggcggatatcaatccccaggcctgtttcgtatgttttcccggatcggtatttccattgagcatattggaagccaaatctccgaaaaataaatctttaccctcactaaagactagagagtgcccggcttttgacatggcttcagcggtaggtagtttactcgtctcgggtaactcgaaggtgatattctctacagccgtattattacaggatgtcacaagaattccataatcggccaatccccgtcccgtctgcaaaccaaatgtcttctgacttttacctgcctccaaagacttcactaaaagcggagtctctgtaaaggcatcatccggctgattcaaatccgctaataaccgggcacgccgtaccacgtactcggcgataatatctttcagcaatgttgtcttacccgttcccggagggccattcacggagaaaatgccacagcctcccgcattttcttcggccaacgctatattaatagccatctgttgcatcaacgccgggctgaactcagaaggccaacggcccagcggatatctttccggacctaaccatttcctataattctctattgagcatatactttgacggttccctccactcatcaaaggagcatttatatagttcaccagtaaacgattgggccttttatccagcagacttttacgaaccctgcttaaatctttcgcatagaagcttatgcttaagtccgtatcatccgattttagcgcacgggcacaaacccgctccaaatcattccttctaaatccatcatttacggtaaatagactccggatccgcagtcgatctagcaactctaccgtcttctgccgcaaaagagagaagaactctatcccttcctcatcctcaattgtcataaagaagtcgtttccatcctccagtagttcctccaaccactcctcatcaacctcccggtcatgaattaagcagctgatcgcccagatataaggcgaaagttggaacgagccttctatgtactctccggacggggataaatcaatcgtatagagcacgcttacagatttattcttctccaacagcttacgaaaacgctcattatccttatccgccggaatcaaacgatatagctcggacaaaagatcatatttaggaacacctcccacatacagacggaagctatccgcatccctgtatggagcatatatgaaatacttcaactcatcctccgatctcacatatcttacccgtacctcatcctccggtaaaccagatttagaagcctgagggaatgacagctcttgaaaatattccaacacttcccagtaagccagaatactagttgttgtatcatgggtacgattcgagacaaagcccaatagcgtttttaagtaagttaagtccatgctttaaaaaaccttagtttacacgaaagcgctcagttagccgctttgttagattaatgatcgtaaatgtaagctatttcgaagtatatttgctacattcgcgtcaaaaataattaaaatatgaaagtcattgatctgataaggaatagtaagagtaccgctttttctttcgagatattaccgccgctgaaaggtaacagtatccagaaggtatataatgtgattgacaagttgaaggaattcgaccctaaatacataaatatcacctcccatcatagcgagttcgtctataaaaccttaccagacggaagtttccagaaagtaaacatccgtaaacgtccgggctccgtagcgatcgcttcggctatccagaataaatacggtattcctgccgtaccccatattatatgtaaaggctttacgaaagacgagacggaatacgctttgatcgatttgaacttccttggcgtaaacaacctcttaatattaaggggagatataaagaccttagaggcctcccagcaaaaaccggagttatatcacgaccacgcaactgatttacaacagcaggtaaatcatttcaacgaaggtattgcgttagacggttccaagatagacggtatagagactcccttctcgtacggcatggcttgctatccggagaaacacgaggaagcacccaatatggaatccgatatctattacttaaaggagaaagtaaaaaatggcgctgaatatctggtaacccagatgtttttcgataatgacaagtactatgcgttcgtggatcgttgccgtgcggaaggtatcacggttcccatcatccccggtatcaaaccgatcgttttcaagaaccaattaacggttcttccgaagatattccgtgcggatatcccagagcctttcgcgacagaattacgtaaatgtaaagatgatgcggaagcgaaagagatgggtgtggaatggtgtatacagcagtgcaaggatctgatcgctcatggcgtaccgagcttacatttctacacaatgatggcctcggatagcgtttacaaaatagcaaaagaaatttattgagatacaataggggtttttccacgctgagttgtctaatagaagtacacgattgaacaatcatgtactaagtatggttatttttaaaattctaaggtaatgaaatacatattctttattggacttgacttgttattgtatccgtttttagttttactctatatatgtcaattgatatttacaaaaccccgcaccttttgatatctgaatacttttccgtaacttcgttccttattctatagaaaaggaaatatctcatgtattttaaagatatcatcgggcaagaggaagtaaaggaacggttgaggcaatcgactcggacagggatcgtaccccatgcgcagttattcacggagcaagggggggccggggcgtttccgctggctttggcttacgcccgttatctgaattgtacgaaccggacggagacggacgcttgcggacgttgcccgtcatgccttaaatatgacgaattggcacatcccgatttgcatttcgtattcccaatcgtagccaagaaagagaaaaagaaagaggtctgcgatgattatctcagtgaatggcgtgggttcctcaaagaacatccctatttcaatatggatgaatggctggattatatcgaggccggaaactcacaagcgatcatctattccaaggaaagcgatgagattatccataaactgagcctaaagatttatgaggcggaatatcgtatcctgatggtttggttgccggagaaactacatcctacttgcgccaacaagcttctgaaaatcatagaggagcctcctatgaaaacggttatccttatggtatccgagacaccggaccttatcctcgggaccatccaatcccgtgcgcaacgcatccacatccgtcccattgagaccgatgcgatcatgaatgccatggtatcccgtttcgggctttcgcccgacgacgctaaacacgtcgctcacctctcctccggaagttttatcaaggcgatggaggcgattagcttgggcgaggaaaataaattctttctggagcaattcaaggccatgatgcgaaactcatgggcacgaaacgtaaaaggcatgaaagcgatggcggacgtcatggcagggatcggacgggaacgacaaaaaaacttcctctcctattgtcagcatttgatccgggagaacttcatgtaccggttccaatcgccggaacttaattatatgaatctggacgaggctagcttctccgttaagttctcccctttcgtcaacgagcgaaacgtgatcgatttgatggaagaattggcgaaagcggaacgccatatcacacagaacgtgaatgccaagatggtcttttttgatttatccttacgaattaccgtactaatcaaaagataagtcttcagattttcttgttacgccaatttcctttccatagatagaagaaagaagaaaggatcatgatattatatacatactccgtagtccagcaaaccgccacgtccgcacgcaaccatacggcgacatacaatatatataatacgtacacgaatatgctagccatatcgatttccagcgcacggcgggtattgcctgtccccgatacgctaaagaaataaataaaaccgggaacggcgaaaagataagaggacagcatcacccacagcgaggggatcgagctagcgatcagatccgggttatccgtataaatacgcaatacggtagacgggaacatagcgatcaagataccgatcggtagcacgaacgcatagcatagcccgatcatcctccggcaaagcggaagcacccggtccgactccccggcgccgatcaagttacttaccagcgagctgttcgtggaggcgaaagcattcacgaacataaacaggaacgaggagatgctacgtaccacattcgtaatcgccaacggccgctcgcccagatgctccatagcgatgaagaagataaaccatcccccaaaagcgatcccatgctggatcatcacccagatagagacactcagtatttgtcccagcatcctaaaatccactctcgtaaaacggaacagaccatattttttataatctatcttcttccaagtataaatcacgaagaacaatacggaaacagcttccgagatcgaggaagcgatagcggcacccgctatccccaaagcggggaacccgaacttaccgaatatcaagatatagttcaagaccacgttggtaagcaccatcaccaccgaattggccgtcaagatcttcgtattcgtcgtactcacgtaaaacgcacggaacatcaccgctataaaagagaagaagaacccgtacacccgccagtccagatagctcatcgtcgcccgatacacctcttctgagccgatcatccggtggagcagatagggcgtaagcagattagaggccgtaaacaacaccgccgccagcagaaaaaggaatagcccgccttgcgtgaaaacctcgccgatccgcttatactccccctcaccattacgacgtgccatcagcacctgagctcctacactgaaaccaaagcccagcatataaatcacgagataatagactcctgccaaggcggaggcacctagctcaacctcgccgacacgtcccagataagcggtgtccgtcaatccgatcatatgctccatgagcaagctgattaataccggatacgtgatctttagaatttgtttgttcgtatatcgcatgatgaatcttaaataaaagggaggcaaaggtagtaataagatgccagtcacacaatattaccccatgcgatccgtttcttatcatattacattattatacgaagagatatggttacaaaactcatcatggcctgcattttgtccgctacgctattgagctgcaacgggcaaaacacaaatacgatcaactacgctaccgtcgaacccctgcatatcaatcgttttgacaaggatttattccggctgatcgatacgggagataccaccttgcaacccgaactaatcaaacaatacccggaaatgctggatatcatcgggaaaggcatattaaacctgcaaaccatcgagactcccggcttcttcgagaaaatgcggaattattactcggagcctaccttgaaaggcttgtatcgtgacgctatcacccaatatgattccgtggaggatatcgagaaatccttggggtacggattcgcctatctaaaggagaatttcccctcgatgcagatccccgctatctatatgcatgtatctggtttcaaccagaacgtattggtaggcgatagcctgctttccctttccatcgataagtatatgggaaaggactatcccttgtatcaggatttcttctatgactcccagaaattgaaaatgcaacgtggacttgtagtcccggattatctggcgggttggctcatgtccgaatatcctttcgcgggaaaagagaacgtattgctggaccggatgatttacgagggaaaaatcaaatacctgctctcgcaagccttaggcgttcccgatgccgccgagctaatgggatacaccgaacaggcctacaactggtgcaaggacaacgaaggaacaatctggaaagcaatcatcgagcgcaagcatctttataccccggatcaactgacgacttcccaatatttcgaggataccccgaccattttccccgggaacgacgctcccgggaatatcgggacttggataggctggcagatcatcaaccagtacataaaggagacgggatctaccccggaggcgttgatgcaaaacaacgacgcccaagaaatcctaaccgcctcaaagtacaaacccctataaacaggaaaaccgccctattctcacgaacaagacggataacctaatctaacttaattctaataccatgaaaaacactatatcttaataacaaggcttttaaaaaaaggttcaatggaatgagattttaaacctcttatttaccttggttgttgtaacaggaaacgaaaacaaggtgagtccgatggataatgatctcttagatataacaaaattgaggcgctggcggatctggaaattgaaacttattgacgccaggctttattttgtaagcattttcgtgggattgctgaccgggttggtagcggtaccttatcactatctgctccagcagttattcaatagccggaaactttttttcgacggtcattacccttggtatttccatgtcttgttcttcttcacgctatggggtatattgctttgtgtgaattggatggtcaagaagatgccgctgattaccggtgggggcattccccagacacgggcggttatcaatggcaggatcacttataagaacccgttgacacaattaatcgccaagttcacgggagggatattagcaatcagcgccggcctgtcccttggtcgtgaggggccgtgcgtacagatcggatcttacgtggggaatatcatttccaaatggggacacgtattggctggagagcgcaagcaacttttggccgccggcgcaggtgccggattggccgccgctttcgccgctcccctcgcttcctcacttttggtgatcgagtccatcgaacggttcgacgctcccaagaccgccattaccaccttgctggcaggggtcgtggcgggaggcgtagcgagcttgatttttcccttcaacccctactcgcagattagcgctattgccccgcaggctacttttatagatcaactgaagttgttcttatttctggccgtggttatttccgtcttcgggaaaatttactcgatgtttaccctttggtgcaaggatttctttaccagactgaagcatcctccttatatgaagatgttgtacctgcttatcatagcgtatacgatctcattgacggagatcgacttgacaggaggaggcgagcaattccttatcatgcaagcgatgcatggatatcaccccattttatggatagcggcgatgatgctcatccacttgatattcacgtctctctctttctcctccggactgccgggagggaatttcatccctacactagttaccgggggattgttcgggcagatcatcgccttattattggtgaagtatggtttcattgagacggagagcatcagctatatcatgttaatcagcatggtaggtttcttggtggcggtagtccggacaccactgacgggtatcgtcttgattacggagataaccgggcatctggatgtattctacccctctatcattgtcggcgggcttacgtattacttcacggaaatgctacagataaagccctttaacgtggttctctatgacgagatgatctcgactccagccttccgtaccgaagggcgttccagcctgttcgtcgagatcatgacaggtgcctatttcgacgggaaggaggtagatcacctcaccctcccccaacgttgtatcatcaagactattcaccgggatcgcaaggacttggctcctgctggacagacccttatccccggcgatcaggtagagatcgagatcgattcgcaggatatcgagaagctgtatgagccgctggttagcatggcgaacatctattaatcgctgatctgccaatcgcctcgaaaagaaatgccacaccaagaattccccggtgtggcacatttacaaaacgctacattatcagaagttatattgagcggaaacattaagtcgattggcgtggcgggtcatatcgttgaaatcggtacgccaacctctcaagtactcggcgccgacttgcagattggcgttcacgttccagaaaatgttggctaccaagtattgaccgtagcggtattgatccgacggagtaaccgggtaatcattctcgctgtataaacgagtctggctataggtactggagacaaataccttcggcgtgatattatactgcaagccagcataccaacccatcatcggaagcacttgcatcttgcctttggcctcggggtccggaaccagatccacgtccagattactgatatcattcaagaactggctgataccccggccgtaagtagcctgaccgtagaagttcagcttgctcgtcacattgaacgtagaggcggcaaacacgccccagccggccttagactcggcccgttgcgccaccaagttctcgtacgtcatattacgtacgataccagctacacggatatggctgctcttattccaagcgtattggatataggcagggaagttcggcatacgttggttactgatattcacgctttggttcgtgatgccatccaccactggcatctcgatacctacacccgctttccatcccttaccgaaagcacgctcatagcgtaacagggtggcacggctgaaaacctgtccggcaggccccgcataatcgatcgagggcggaagagcggccagatccatgaaggtactataatcgtaacccatcgtgaaaccaaggaaagacacataggcgttctggagctcgaagaccttgctgcctccccggaagttacccgccgtatacacgacgaaatccccgaggtgtttggtacgacccactaatttcaagaatatcgtactggtagtagcgtccatctggaactggttacggacgtagttctgcccaccattcgggatcatggacggataaaaatcgacatcatccgagatcccgccgaaatcatactccgccgtagccttcacgtaaccgccgatacccaaggcgaaacgtcccttacgatcggtcaatacgaagcggggggctttcgggtcgtggaaacgagggctctgcgtctcattcattatcctcacgatttcatcacctgccttgtcttggctgacaaggactatcgaatttggcgcatcatcctcgatgaccaccttttgagccttagcgggagccgataagaatcccatacctagcagtaatactgctccttgtacaaatagtctcataaatgtgttttgtttagattaattacctaccttgaacaaggctataaagaaaaggttctgattttaacaaccctacgagcactttttccaccctattgcccgttcaaaaaatattcatatatttgcggaatatattatttgggatgagaagatttttattgttcatactcgctgttctttacctcggggtttcctctgggtttgcgctgaattaccattattgtatgggtaagttggcggaggtgagcttgctgtatcttgacacttgtcccagttgcggtgaggcgggcacgtcccataagtgctgctctaccgagacggaatatgttaagttatccgtcgatcaggatgtggcgaatacgctcgtgcaattgtccgctcctgtcgctgtagttttgttgttcgatctactcgactcctataagatcgccgggcgagacgagacaacacgttccaatccctttattaatccacccaaggagaatagcgctatcccgttattcgtccatcattgtacttttttgatttagcggtataggcttcctttttaaaaggcgatttacgtctgtttacgcacgagtaccggcgtaatctattgcgagtactggagtaatccaccgcaagtactggagtaatccattgcaaatactggagtaatccattgcgagtactggcgtaaaacatcacgagtactcatgtgatcgcttgccttcaaagacgaacaaataagcgttctcatatgttttcaaatcataaaagctcattcaaatgttaaatagaatcattcgttacttccttgagaacagggtggtaaccttacttttactagtgctgattatcgtatggggcatttccacgtcccccttcaattggcacggagggatcattccccggaatccgattccggtagacgccatccccgatatcggcgataaccagcagattgtggccacggaatggatgggccgctcgccgaaggatatacaagaccagatcacctatccgctgaccacctctcttttaggtatcccgggagtgaagacgatccgtagttcctccatgttcgggatgtccttcatatacattatcttcgatgacgatatagagttctactggagccgttcccgtatattggagaagctgaactccctgcctctgggaaccttgccggaaggcgtacagcctaccttgggaccggacgctaccgccctcgggcagatctattggtatacgctggaaggacgggaccccaagaccggtaaacctaccggaggctggaacgccgaggagttgcgtacgatacaggatttctacgtcaagtacaccttatcctccgccgagggggtatccgaggttgcctcggcgggcggcttcgtgaaggagtaccagatcgagttgaacccggatgccatgtatgccttcaacgtctccgtgatggatatcatgagcgccatcaagaagaacaacctcgatatcggcgccgagacgatggagatcaacaaggtggagtacctgatccggggcttggggtatatcaagaatgtaaaagatatagagaatgccgtcatcaccgttcgggaaggcgtaccggttcgcatatcggacgtggcgttcgtgaatatcggtcccggaacccgacggggagggctggacaaggagggtgtggaggccgtgggcggagtggtagtagcccgctatggctccaaccccttggaggttatcaataacgtaaaggcgaagatcaaggagatggagccgggattgccccaaaaggtactggcggacgggacggtctccaaggtaaccgtcgtgccgttctacgaccgtacggggcttatcaaggagacgatcgggacgttggagaccgccctttcccacgagatattgatctgcgtgatcgtcatcatcgtgctggtactcaatctgagggcctctatcgttatcgccagcatgctaccgatagcggtgctcgccacgttcatcatcatgcgttatacgggggtagcggctaatatcgtggctttatcgggtatagcgatcgccattggcgtgatggtggatgtaggggtcgtcttcgtggaaagtatcatccgttaccgggagatgcccgagaacaggcatatacaggggggaaaggcgtttgtcaaccttatttataaggcggtaagcgaggtgtccggggcaatcagcacagcgatgatcacgacgatcgtcagcttcctccccgtcttcaccatggaggcgcaggaagggaagatgttctcgcctttggcctataccaagacgtatgctttggcttccgccttcgtgctgggattgatcttgcttccttccctatcgtattggttgttctcgataaagatccattcaaggctgatacggaaaatactgaattgcctgttgatcgtggccggaatcgccttacttattatttatggaagtattccggctatcgggctaacggcagtcggggtgaataatctattgtccggttattggaagaagcctcaaatgagcacttatatcaatatcggtatcaccctctttgtcacgatctattacctatccgaggaatggttgccgatggggccgcaaaaagggatgctccccaatatattgttcgtggcgggttgcgtagccatcatcctaagcatcctgtggctgctcgttatgtattatgagaggatattgcgctggtgcttggataaccgctggaaattcatgttgattccgggagctaccatcgtattcggtttctggatatggagaggcatcggacaggagtttatgcctagcctgaacgaaggttctttcctactgatgccgactagcatgccgcattccggtatcgagcaaaaccttgattatatagaggcgctcgacaaacggctggcctctatccccgaggtggagaccgccatcggtaaatggggccgtgtaaactccgccctcgatccagcgccggtacagatgttcgaaaatatgatcaactaccgtccggaatgtatcctgaatgaggacgggaaaagggaacgtttcaaggtaaaccggcaaggggagtatctcctaaaagatggaggcgtatataaccccaaagacggtttccggctgattccctcagacagcctgatcccagacgctaaaggcgattacttccgccaatggcgaccggagatcaagaacacgaacgatatctggcaacagatcgtgaacgtcacccatcttccgggattgacttccgccccgaagctgcagcctatcgaggcccgtctcgtcatgttatccaccggtatgcgtgccccgatgggtatcaaggtgtatggcccggatctggagacgatcgagaaagccggaaaggcgatcgagaaggcattgaaagaggtaccctccgttatcccctcttccgtattttacgaccgtgcggtaggcgccccttatctggagatcgaactgaaccgtgagaatatggcccgttacggcgtaaacgtggaggacttgcaagagatattaagtgccgctgtcggtggcatggtactgacccgcactgtggaaggcagggaacgtttcccggtgcgcctacgctacgctcgtgagcttcgagataatccggaggcgctaggtatgatcctcgtaccgatcgccactggggcgcaagtcccgcttaaagagctagccgatatcaactatacccgtggagcgcagatgatccaaagcgagaacactttcttggtaggctacgtcatcttcgacaaactggcggggaaggcggaagtggatatcgtgaaagaggcttcccgcatccttgagcaacagataaaggagggcgagttgaaccttgatcccggcgtatcctataagttcgccggcaattacgagcagcaggagcgtgccaccagccggctgatgatcgtcgttcccctcgccttgttgatcgtcctgctggttctatactttcaattcaagacggtcactgcctcactgatccatttctccggggtgttcgtggccttcgccggaggttttatcttgctatggctttacggacaggattggttcatgaacttctccatcgccggagagaatatgcgggatcttttccagatgcacacgatcaatctgagcgtggcagtctgggtcggtttcatcgccttgttcggtgtggctacggatgatggggtattgatgggaacctacatccatcatgtattcctcgagcgagacccccgcaccaagcacgatatccgggaagcggtagtagccgccggactgaaacgggtacgcccagcggccatgactacagccactaccctgatcgctttgctccccgtacttacctctaccggtaagggggcggatatcatggtaccgatggctatccctacgttcggaggaatgctgatccagagtatgaccatgtttgtcgttcccgtcctgcaatgctggtggcgggagaacgctataaagaaagaacaaaagaataaaattcaagaggaggtaacgacttatgagatataaaagaatcagatcaatcatcatggcaggtgtactggggatgctaaacgtccttttcgcttactcccagccggccgatagtttaggctattatctggaactggcagcacgtaacaatccgcagatcaacgccgacttctccctgtataaggcatctttggagaaagtcccgcaagccggagcctatccggacccggaactggagatcggtttcttcctgaaaccgatggagatcttgtccggaaagcaaatagcggatttcaccttgatgcaaatgttcccttggttcggtacccggaaggcggcccgcaacgaggcgaccgagatggcccggatggcttacgaacaattccgtaacagtcgcaacaacctgtattacgaggtgaagagtcaatggtaccagctttgcaatatcagcgagcaatataaaaatacgcaggcgaaccttcgtctgctagaccagttggaacagttggcattgaaccgcttctccgctccgtcggcgaaggcgggcggttcctccgtcctaccctcccccgtatcttctgctccatcgactcctcccgccgtatccggtggaggtatgtcgggtatgggaggcagtagcatgggaagccctacggtacaaagcacgggagcatccggtagtacgatgtccggaatgtccggcgatagccctatgggtggaggctctatgggaagtggcaactccatgggcggaatgtcggacgtactgcgaatccagatggagaaggtagaactggagaatacgctagcctccttgttatcgcaacggaaaacggccgaggctgcttttaatacgttgctcaatcagtcgctagctaccccgatttccgtccccgactcgttggaacggcttcctctctcatggagtgagtcgatggctctcgacagcgtcatctccaacaaccccatgcttaccatgctggaggcggaaggaaacgcttaccgggccaaggcggagatggacaagaaaatgagttaccccatgctaggtatcggcctccagtattccttgatcgggaagaaaccggaggatatgtctatgggctctatgtccggtatgaacggaaaggatatgttcatgcccatgctaaagatcagccttcctatcttccgtaaaaaatataacgcacagcaacgggaaagcaagcattattggaaatccagcgagttgaagtacgagaacacgatgaaccagctgcaagccgagtatatccgtattacccagcaattggaagatgccgcacggaaaatcgatttgtaccagaaacaatacgatctatcgttggccacctaccaactgatcgtccgggaattctcgacaggaagaacgaccttgaccgacgtgatccaagtggagcgacaaatgttggactatcacttgaagaaaagcgaagcgatagcggaatataatacccaaatcgccggaatcgagaaattaatatccacctctgtaaacgaataagaaaatgaaaaatataaatgaaaccgtaaaatccaagtacctgatatatatcctgttcctagcgggcggcctcttgttgggctggctcctgttccataactccgataccgacagccatacgtcacaagcgagcgagaccggcacggaagttcacgcccctacgcatggccacgacctccaacagaacgaggccggcgagtggacttgttccatgcatccccaaattcgccaagacaagccgggtaaatgccctatctgcgccatggatttgatccctgtacgtaagagctccttctccgacaaggccatcgatcccaacgccattcagctttcggaagaagcagcagccttagcggacgtacaaacctccaaggtatcccgccagaatccggtcaagcaagtccgtttatacggcaagatcgtaccggacgagcgtagcctgcaatctcaaacagcccatgtaagcggacgcatcgagagcttgaacgttgatttcacgggtgagacggtgcgtgccggacagaccctcgctaccctctactccccagagcttttcaccgcccagcaagaattgttggaagcgatccgcatgggacaatctcaattgatacaggccgcccgtgaaaaactatatttatggaagatgacagatgcccagatcgccgctatcgagaagtccggctctatctccccggttgtagagatcaagtcgaacacgagcggtatcgtcctgtccaagcgggtaagccaaggtgattatgtatcccaaggagctatccttttcgacgtggcgaacctcacgaaggtatgggccttgttcgacgctttcgaggtggatctccctttccttagcaaaggtgatccggtggaatttaccctgcaagcgctacccggcaagaagttctcgtgtaagatctctttcatcgacccgatcttgaacacgacgacccgtaccgccaaggtccgtgtagaggtaccgaacgcctctttggagctcaagcccgagatgtacgccacggcaaacgtaagcgccccgctccgcaactataagaacgagatcgtcgtaccgcaaaccgctgtgctctggacgggtaaacgtgctatcgtgtacgtaaagcaaccggatacgaatacccccgctttcttgatgcgtgaggtggagctaggcccttcccttggtaactcttatgttatcttgaatggcttgcgagaaggtgaggaaatcgtaaccaacggagtcttcgccatagacgccagcgcacagctggagggaaaaacttccatgatgaataacggcgacgagcccgccaagcctatgactgggcatgaggggcatatgatgcatgcgcaaagcgccacgggggtagcctccgagcatgccatgttcggtgtcaaaggctcttgcgatatgtgcaaggaacgtatcgagaaagcggcaaaaggggtaaaaggtgtgttatccgctcattgggacaaagatacccagatgatccatctccagtacgatccgaaaaagacctccccaaaagcgatcagcaaggcgatcgctaaagtaggccatgacacggatatggataaggcggataaagccgtatatgataagctaccggcttgttgccactatagataaagttattggacattcgggggtgtgtcaaaagtgtgaacatggcacgcagataatgctgattgagcagatgaccgcagatttatgatatgaaaatcaatatattatctgcgtaaatctgctaaatctgcgtgccataataccaacttttaacacaccctccttattagtaaagattccaacggaaagaagcgactgctttagcgggaacctcataggtaaatgaacgttcaccgctgtttaccgttatatttttagcctcgtccgtattatttagtaaaacaagtgcttctgttccatctaaattctcgaaggcggaatacataatcccatcagccgtataccctttagagccgatccgtactgcccccggcttcaccacagaggataaatgaccgataatataataatgagaattccgggtaatcgtcttataatccgagcgatcgatatccacggcaccataacaagtctggcaaccaccctctcggttcggtccccgctcgttatccagcatcaagttccatacgataactgccttacaccagttattcaccgtacccaaggccgtctcctccatatcttccatcaagcgtttctctaagttacgtccatcattccacatgccgatagaagtttccgtaaatattaattctttatcggggaacttgccgtttacgttattcaactcctcccggtcgcccccgtaattatggtaagcggcacctgtcaggaaagaagcggcattctcatcctcgtagattttcatcggatagccttgctgctccaacatattatcgtaattgtaattatggtcgaaagcgtagatcttcgtcttgaggccagtctctttcagtttagggcctagagcgtcacgcacgaaagagagttgctcctcccatcccataaataaggaagcggaatttcctcggttcaaaggttcgttttggggagttatcgcctcgataggaatcccctcggcctccatcgcctgtatccatttcacgaaataggtagcgtaatcttgataataagcgggattcaactgtccgctagtccacgactcgaacgggcgcaaatcctttaagttatccaccttcatccatcttggacaagtccaaggcgatcccaagatttttatagaagggctgatcgccaagatctccttcaagatcggtatcacatactccttctcctcgctctgcaaggcgaaattctcgacacccttcgtgtcacaacaagtatactcacttaaagaaaagtccgagcagccaatcgagatacggatatagctataccccatcccctccgtatcagagaaagtctctttcaggaaagctgtccgatcctcgggagccatccgcatcaagttatagcaggtagagcctgtcacggcggcaccaaagccatccatcgtctgatagcgcaccgaagggtctatcgttatcacgcaaggcgaggcggcttgtttgtcccccaaggcgatctcacttctcacgaaatctttcgcacgatcgtttgtcgtgacatacaccgttacattgtccgagatcttcgctccagaacatgcgttcaagcaaatcaagaccattaataaagaaaagagaaccatacgtattaaattaatagttaatcaaattaccgggtttctgaacccttcaagatcatcctcacgtgattctttaagatgtgaaaggcgggagcggccatcgatccatgatcatatccgtccaactcatagatataagtattcttatgtccggccactttcatcatacgccaaaaataggcgttctcctcatagcggcccagcatctccatctcccggtcgcccgagacgataatcaatggaggagcgtcaggacgtacgtaaaacaaaggggcgaactcgtcgatactcggttgggtatctttcattcccttcgcctgccgataagcgaaatggctgatcgcatgaccgctgaaagggattaatgcggcgatggcatcagcatctatccgatacttagtcaaccacttcttatccagtccgaccatattcgttaaataacctccggcggaatgacctgagacaaagattttacgcctatccccaccatacttctcaatctcgttgaatgtccaagcgacagcggcggcggcatcatcgatacaatcgctcaacgtggctttgggtagcaagcggtaatttacggcgataacggctaatccgcagttcttcaattcctccgggatgaatttgctacctcccgacaagccgcctccgtgaaaccagactaccgtagggaagtcttttgcgttctcgggataataaagatccaatttacaacgttccaccgcatatggatctttcgattgggtataagagatatccctgactattttatagtcttgatcttgcgccgcaaggatattacagataaacagactaaatagaaataaatagattttcttcatgatattagataatagatttaatacatcaaatttaatataaaaaaaggagtcaccccttacggactgactcctctctcttccggctttcgcctttctcaagacggcggctacctactcttccactgttacgcagtaccatcggcgtgacgaggcttaacttctctgttcggaatgggaagaggtggatccctcgtgctatagccaccttaatatcattatcaagattttgaccggacatcaatccgaagagaccagcttcgccttatcgtcttaaaatatatcaaccttcactgtgaggaaagtcccgggctattagtaccactcggctcggacgtcgccgcccttacacctgtggcctatcaaggtcatcgtctataaccacccttgagggagatctaatcttgaggccggcttcgtacttagatgctttcagcacttatccgatccgtacttagatacccggcggtgcccctggcgggacaaccggtaaaccagtggtacgtccgacacggtcctctcgtactagtgtcagagcctcgcaaatctcctgcgcccacgatagatagagaccgaactgtctcacgacgttctgaacccagctcgcgtgccactttaatgggcgaacagcccaacccttgggaccttctccagccccaggatgtgacgagccgacatcgaggtgccaaaccattccgtcgatatgagctcttgggaatgatcagcctgttatccccggagtaccttttatcctttgagcgatggcccttccatgcggaaccaccggatcactatgctctagtttcctacctgatcgacttgtatgtctcccagtcaagcgcccttatgccattacactctgcgaccggttaccaatcggtctgagggcacctttagaagcctccgttacgcttttggaggcgaccaccccagtcaaactacccaccatacagtgtcctcctaactaggagttagaactcaaacaaccgaagggccgtatttcaacgtcggctccacaaatactggcgtacctgcttcaatgcctccggcctatcctacacatcgtctgcccaaactcaatgtaaagctatagtaaaggttcacggggtcttttcgtcccatcgcgggtaatcggcatcttcaccgatactacaatttcaccgagctcacggttgagacagtgtccagatcattacaccattcgtgcaggtcggaacttacccgacaaggaatttcgctaccttaggaccgttatagttacggccgccgtttaccggggcttcaattcaacgcttctcctcgcggatgacatctcctcttaaccttccggcaccgggcaggtgtcaggctgtatacatcatgtttccatttagcacagccatgtgtttttgttaaacagttgcctggacctattctctgcgcctcgccttacgacgaggaccctttatcccgaagttacagggtcaatttgcctagttccttaaccgtgaatcactcgagcgcctcagtattctcaacccgaccacgtgtgtccgtttacggtacgggtgccgcatggataagtttagcggattttctcgggagcatggttacgtccatattacgttgcgcaagcgctccgtatactctcaggttcgactctccccgcggatttgcctacgggaatcaatatctacacccttcaaccggctattccgtcagccggcaggactgtcacttctccgtctccacgtcactccatgaggcagtatgggaatattaacccattcttccatcggcggcgccgttcggctttgccttaggtcccgactcaccctgatccgattagcgttgatcaggaaaccttggtctttcggcgggggggtttctcgccccccttatcgttactcatacctacatttgcttttccatgcgctccaacaagggtcatccctcatcttcgacgccgcatggaatgctcccctaccatgtcttgcgacatccacggcttcggcagatcgtttatgcccgattattatccacgccagatcgctcgactagtgagctgttacgcactctttaaatgaatggctgcttccaagccaacatcctagctgtctctgcgatccgacctcgttagttcaacttaacgatcatttgggggccttagccggtggtctggattcttctcctctcggacacggaccttagcacccgcgccctcactccctgtaaatatatatcgcgcattcggagtttatctggacttgataggcggtgaagccctcgcatccaatcagtcgctctacctcacgatatactataaagaggctgcacctaaatgcatttcggggagtacgagctatctccgagtttgattagcctttcacccctaccctcagctcattggaaagcttttcaacgcttacccatccggtcctccagttggtgttacccaaccttcaacctggccaagggtagatcactcggtttcgcgtctaccccccccgacttggcgccctgttcagactcgctttcgcttcggctccgtaccttaggtacttaaccttgccggggaaggtaactcgtaggttcattatgcaaaaggcacgccgtcacgtcattacgacgctccgaccgcttgtaggcagacgggttcagggtctatttcactcccctgctcggggttcttttcacctttccctcacggtactggttcgctatcggtctctcgggagtatttagccttacgggatgggccccgctaattcacgcaagatttctcgtgccccgcgctactcaggataccactaggcttcaatcgtcagtcgtgtacgggactatcaccctctacggtcgccctttccaaggcgttccacttgactctatcttgccacgtcgtggtcctacaacccccgtgtcgcctagacgacatgggtttgggctcttccgtgttcgctcgccactacttacggaatcattgtttattttctcctcctatgggtacttagatgtttcagttccccacgttcgcctccctttcgggatggcaggccttcagcctgccgggttgccccattcggatatcccgggatcaagggctatttgcgcctcccccgggcttttcgcagcttatcacgtccttcgtcgcctccgagagccaaggcatccaccgtctgcccttgcttactttctctcacctcgtacttgacgcacgggttgatatatcttaagctcgctctacttgtttcttctttttgatgtccaacatgtcaaagatccttcttactgagcccgactgtcgtcgggacgggattggctgatgcctatccctctcaataaactgtggagaataacggattcgaaccgttgaccctctgcgtgcaaggcagatgctctagccagctgagctaatccccctcattcggagtagtcccaggcagagttgaactgccgacctctacattatcagtgtagcgctctaaccaactgagctataggactgtcaactttgccaagacttacgtcccagcgtcatctttttctctccgaccggcctcccggtctgtaagatctatatataaacataatctcaacagcagcacaagggatcaatacctcgtatgacctcggtacggaatcctgaagctccagaaaggaggtgttccagccgcaccttccggtacggctaccttgttacgacttagccccagtcaccagttttaccctaggccgatcctcgcggttacggacttcaggtacccccggctcccatggcttgacgggcggtgtgtacaaggcccgggaacgtattcaccgcgccatggctgatgcgcgattactagcgaatccagcttcacggagtcgggttgcagactccgatccgaactgagacgtggtttggggattcgctccctgtcgccaggtggcctccctttgtccacgccattgtaacacgtgtgtcgccccggatgtaagggccgtgctgatttgacgtcatccccgccttcctcgcagcttacgctggcagtcccaccagagtcctcagctttacctgttagtaactagtggcaagggttgcgctcgttatggcacttaagccgacacctcacggcacgagctgacgacaaccatgcagcacctcgcaaacggctattgctagaaaaggtgtttccacctcggtccgaatgcgttcaaacccgggtaaggttcctcgcgtatcatcgaattaaaccacatgttcctccgcttgtgcgggcccccgtcaattcctttgagtttcaccgttgccggcgtactccccaggtggatcacttaacgctttcgctgtgccgcttacagtgtatcgcaaacagctagtgatcatcgtttactgcgtggactaccagggtatctaatcctgtttgatccccacgctttcgtgcatcagcgtcagtaatggcttggcaggctgccttcgcaatcggggttctgcgtgatatctatgcatttcaccgctacaccacgcattccgcctgcctcaaacatactcaagccccccagtttcaacggcaattctatggttgagccacagactttcaccgctgacttaaaaggccgcctacgcaccctttaaacccaataaatccggataacgctcggatcctccgtattaccgcggctgctggcacggagttagccgatccttattcataaggtacatacaaaacgggacacgtcccgcactttattcccttataaaagaggtttacgatccatagaaccttcatccctcacgcgacttggctggttcagcctctcggccattgaccaatattcctcactgctgcctcccgtaggagtttggtccgtgtctcagtaccaatgtgggggaccttcctctcagaacccctatccatcgtcggtttggtgggccgttaccccgccaactgcctaatggaacgcatgcctatctatcagcgatgaatctttagcaaatattcccatgcgggatccctgcttcatgcggtattagtccgactttcgccgggttatccccctctgataggcaagttgcatacgcgttactcacccgtgcgccggtcgccacccggtattgctacctgtgctgcccctcgacttgcatgtgttaagcctgtcgctagcgttcatcctgagccaggatcaaactcttcgttgtttaaattgttttatgtcctcgctccggaatccgttattgtagtccaaagtcatacttctttgacggtatcaatccggaaaatttcttctcctatacttgtactacttgttgaattatgtaaatctctcaaagaactcttttgtcgctttcgttttgcgaacgtggatgcaaagataaatgtttttcttttaaacttccaaattatttcagaacttttttcaagaaaaatttgtttcattatttcggtatcgccgttctctctcgaatgcgggtgcaaaagtaacgctataaaacataacctccaaacattttcggcattatttttcaagttttttctcatggctcaacaatccttacttttaatgtacgcacacgataaaggcacatatatttatctgtactgatgttgacaatatctggatgggcatggaaataggtttcaagtttcaaggtttcacgaaccccttttcctcacacacgcacaagtacatataatacagttcctcatgatcgctccgtccgcctcgggtaaagacatcatgtcgtggctacgcaagttcttcgaggctatccatcccgcataacaaacataaagggctttatttgaaacctatataatgtacgtatcgtgtgtgtgaagaaaaaggtttcatgaaaccttgaaacttgaaacctgcctatagtcattttttaattcgatacacgcataagcaaagaagagccatacgatagacttaattccttcgagccaatgacttaaatcaaagagcgcaaagagctaagtcatcaagcgcaaagactcaacttctcatcccccaagttccaagtcctttatgcaccttaatccacaactaattaaaaaatctgataacagaacacgaatgtccgctctcatcagtccgacacattgaagcgtattcccacagggtcatcatattgtttttgcagcttataaagctcgtctcgcatgcgtttcatcactgcctcgtaactgggcttaccgtaaaggttattcatctcgtggggatcttcttggaggtcgtaaagctcccatacgtcgatgtcgttgtagaaatggatcaatttataacgatcgtcacgtacgccgtaatgacgcttcacggaatgctcggcgggatactcgtagtaatgatagtaaagggagttacgccagttctccggccgctcgcctttcagcaagggaagcaaggactcgccttggatgtcggctgggatggggactccggccagttccaaaaaagtgggagcgtaatcaatattctgcacgagctgcgggatatcacccttcttgccacccggcagacgcatcagcaacggggtgcggaaggattcctcatacatgaagcgcttgtcgaaccagccatgctcgcccatgtagaagccttggtcggaggtgtagacgatcaacgtgttatccagcaaatcgttcttctccagataatcgagcacgataccgatgttccgatccacggaatggatcacccgaaggtaatcgtgcatataacgctggtatttccactcggccagctccttacccgtgcgtttcttcgccttgaagtcttggatgatcggatcgtaataggcgtcccaagcggctttctggtccggattcatgcggttataaagctcacggccgtacttctccagatcggcgttggaggaatggatctcgttctccttatcggccattttcaagtcgtatacgatatccatatccttgatgatgctcatctcctgctccgaggcggcgatgcggccggcgtaatcgtcgtagaagttctcgggcagcgggaaggtcacatcgtcgtaaagacgcaggtcgcaggtatcgggcatccaagtacggtgcggagccttatggtgcagcaggaggcagaaaggcttgctcttgtctcgtttattgtccagccaatcaagagccagatcggtcgtgatgttcgtggcgtacccttcgatctgacgcttctcgccgttatcgatgaagatggggttatagtaatcgccttggcctacgaggatgttccagtaatcgaaaccggtgggatcggaggtgaggtgccatttgccgatcatggcggtttggtaaccagctttacgcaatagcttcgggaaggtctgctgcgagccgtcgaaggtatgggcgttatcgatgaagccgttcttgtggctgtgcttgccggtcagcatgcaggcacggctggggccactgatggagttggctacgaagctattggtgaaacgtacgccctcgtttgcgatgcggtcgatgttgggggtttggatgtatcgcttgtcgtaggcgctgatggtttggaaggagtgatcgtccgtcatgatgtaaaggatgttcatgggcttggcgggctgtccggacgaattctctttttggccacaggaggtggaggctatcgccgccagacctgtcaagatgaatagttgatttgttttcatgtattccgtctagatttatgtgaggatgagacggggcacaccccgtctctacaattgatgatattaaccttggtgatattagccgaggaggtctttcagcttgccttcggattgcagcttcacgatcaactcgccaaacagagtattcgtccaagcgaaccacgagcgggtgtaatcggaaggattgtccttatggaaagactcgtgcatgaagcccgtgcctccgtccgtatcgcgaagcgtctctatgcaataccggatctccttctcgtcgttggaagtcgtagcacgcatgatcaagctcatcggccagatatagttgaaaccgatatgcggaccgccgatgccctcgccggcctttcccttgaagaagtaagggttggaagggctcagcaccaaacgacgggtattctggtaaatcgggtcgttcacgtccacgcaacccaagaacggcaaggccagcaagctcggaacgttagcgtcgtccatgaagacacggctgccgtaaccatctacctcgaaggcgtacaccttaccgaattccggatgctccacgatggcatatttcttcacggcctcctctacctcacccgccaacgcctcgcaacgaccggccaagtccgtgttatttcttacggcacgaagaatctcagccacctgacgaagcgaggtgatagcgaacaagttcgatggcaccaagaagccaaacagcgtagcgtcgtcggaaggacggaaagaggagacgatcaggcccaccggattcaccgggctaccccaaccatcgttcaagagggtatcgccttggcggtccgtcacacgggagaaacggtacggcccgaggctgtccttgcgctgttgctcacggaaagtacggtaaacggcctccatcgcctgctcccatttgctgtcgaatacggaggtatcgcctacttccttccaataatgatacgccaagcggatcgggtagcaaagcgagtcgatctcccatttacgctcgtgaagctctttcttcatctccgtgcggtcgctctcccactcgctcccggtagggccttcgttgaagccattagcgtagggatcgatcaggatgcaggcggtctggcgattgatagcaccaaccagcatctgccgcaagtccttatccttcttcgccaaggtgacgaaggggtaaacctgcgccgaggagtcacgcaaccacatggcgtgaatatctccggtgatcacgaacgtatccggcttgccgtctaccatcttgaactcacaggtcgtgtccaaggtattcgggtagcagttctcgaacatccaagccagtttcgggtccttgatacgggccttggaagccttcagttgctcctctaccgccttggaggtaaacttacgggcctcgggagccgggcgcttgctggcgtaatcgccggtcaccttagaggcgatcgtgctaaaactctttttattgtcgggcgtactcacggcggagtataccttctcgccaaccaacaggccggccaaggaaatagatcctgttttcaggaaattacgtcttgtagtcatttatatagtttttatggtattatattccagtggcaaagttaagaaaaaaaataaaggctcccaatccttttcggaccggagccttcgccaactcaataattccttaaattagcctaaatacgatttgaggagcttgctacgagttccttgtcttaatcttctgattgctttttccttgatctggcggacacgctctctagtgaggccaaatttgtcgccaatctcttccaatgtcatttcctgacagccaataccgaaaaacatcttgataatctcacattctctttcggtcagtgtagcaagcgctcgatcaatttccttagccaatgactcgttcattaacgaccggtccgcgataggagcgtcatcgttcacaagcacatccaaaaggctgttgtcttcgccttccacgaacggggcatccacggaaatatgacgtccggacaccttcaaggtatcggaaatcttatccaccgggatatccaactcatcagcaagttcctctggagacggtctgcgctcgttttcctgctcgaacttggagaaggccttgctgatcttgttcagcgagcctacttggttcaacggaagacgcacgattcttgactgctctgccaaagcttgcagaatagattggcgaatccaccatacagcataggaaataaacttgaaacctctcgtctcatcgaatttctcagcagccttgatcaagcctaagttaccctcattaataaggtcgggcaaactcaaaccttggttctgatattgcttagccacagaaacgacgaaacggagattcgcacgggtcaatttctctaacgccctacggtctcctcttttgatagcctgtgccaattccacttcctcttctaccgtgataagatcttctcgaccaatctcttgaagatatttatccagcgaagcgctttcgcggttggtaatggactttgtgatctttaattgtctcattcaatttgtttaattgagaatacggggtgcaaagataaccatttttgttgaaagaattggctggatgcaccccacatccagccaattaaaaacctttaacaatcttttcacacctataagactacagtccttgtttatcttattcggcaagatctatcgcatagtacttcgtacgtccgttcgggtagaagcctttaatgaagaggccttgatcttccgtacgtccttgaagtatgctttccacaatcttttccaagtcttccggagcagagatcttctggttgtttacaatcatgataatgaagcctttctttataccggcgtctttcagcttgccgctggtcagaccggtgacctcgataccataacttacacctaacttacgtttctgctcgtcgttcaaagccttgaacgctgcgcccataacctctgcgctgtcgccacccttcacgaccttggtgctaccttgcgcattacggagttctaccgtgaatttcttcgtgctaccgttgcggttgatcgtcaactctaccttgtcgcccggacggtatttgctgatctgctcttgcaaagcgctagacgatttgatcttcacgccgttcacggctacaatcacgtcacccttctcgattccggcttccttagcggagctgcgctcggcgaaaccacctacgtaagcgccctcgaatactttcactttctctttctcagcgtcgggcacgtattgcgggtcttgtatcaatacgcctaatacggcacgctgcacggttccgaattgcttcaagtcgttagccaccttgccggcgatgctgatgggcacggcgaaagagtatccggcgaagttaccggtctcggagtagatagcggtattgataccgactaactcgcctttcgtgttcactagtgccccaccactgttacccgggttcacggcggcgtctgtctgtataaacgactcgatcttgctacgatccttgccaccggcgccgatgttgccacggctcttagcgctcacgatacctgccgtaacggtagaggtcaagttaaacgggttacctaccgccaacacccactcacctactttcaacttctcagaatcaccaaaggggatcgtaggtaagtcggttgcctcaatcttgatcaaggcgatatctgttgtcggatcagcccctataatctttgccgggaatttccggttatcgtttaaggtaacctccagctcgtcggctccgtcgatcacgtggttgttcgtgatgatataaccatccgtagagataatgacacccgagccagcgcccacacgaggttgctgttgcggacgttggaaccctccacggccaccgaagccgaagaaatactcgaacgggtccatatactgctgaccgccgtccccgttagaggcttgcgcgttagccgtggccttgatatggacaaccccgtggatggcgctctcggcggccgtagtgaaatcgatattctcggcggccacggttccataattcgtcaatcggtacggttgcttgaaggtattctcaactccggaggccaactccgccggacgttgattcttattcatcaggtaagtactcgttccgatcgcggcaccagaactaatggctgctatcagagcaacaccaagcacattcttccagatatttttcatacttttcttatttaattaaacacttaaatttaacagtttctttacggcaaagaaaactcaaaaattgtgcggatattccatttccatcgtattttttatcacttttaacgaggcatcacaggggcttaaccgcacttaacagtactgtgtattgcaaagtacctttttaacaattaaacagcagacgaattgacagttgacacgcgataactgacagtcggcaatcgataaatgacagtcggttactggcaatctagaatctctgttcgtataaaaaacacctaggagacagaatatgtttacggctgaaaaagaaaatgttatcctatctctcctatgcgtctacaaaataattgtcaaccgccgaccgtcaactgtcaactaaaatacctatctttgtcctatcgcagtctgctggtctgtcgctcaccttcgggtgtgaggaaagtccgggcaacacagagcaccatacttcttaacgggaagctgtccgtgagggtagagtaacgtaacagagaataaccgccggactcgtccggtaagggtgaaaaggtgaggtaagagctcaccgggtcccgtagcgatacgggatgccgtacgtcttatgggttgtaaggtcatgtataccggcgcatgtaggatggctcgtccgatgccggggggtagaccgctaaagcttaccggcgacggtaagacaagataaatggcaggcacctctttccaaagaggtacaggacccggcttataggcagactgctttttttatttgccaattaaatcatgtgccgatatgcccaaaaacaagccacgggaagaaaagaaacctattggagaacggatcagcgcattattagcacgaaccatccgtttcgttacctacgacatttggcggattaccgagaatgaagttagtgggctgaaggagatttatatcaatatcatcaagacggttatactcgccgtgcggggtttccagagcgagaacctgcaaaccaaggcgtcggcgcttacctacagcaccttgttatctatcgtacctttgctggccgtattattaggtatagctaagggcttcggtttccaagggacggtacggcaggagttgttcgattatttccccgggcacgagatggagctgaacaaggcgttcgagttcgtggagagctatctggcgcaggcgcaggggggagtgatcatcggggtcggtttgattttattgttttatacggtgatcaacttgatctcgtccgtggaggatacgttcaacgacatctggcagatccagaaatcccgtccgtggtaccggaagatatccgattatctggccttattcctcgtgctgccggtgctgatgacggcatccagcggtttgtccatcttcatgtctaccttgcagaactcgttcttggggcaatacttgttttttacgccactcgtagagctgttcttgcatatagcgccttatattatcacgacattggctttcacggggctgtacgtctccttgccgaatacgaaagtaaggttcgtgaacgggttggtggcaggctttatcgctggttgcgccttccagttgttccaatttatttatatcagtgggcagatttgggtgagcaagtacaacgctatttacggtagttttgccgcactgcctttgttgttgctttggttgcagctttcttggttgatttgcttgtttggcgcagagctgtcgtacgcctcccagaacgtgaagaaattcagctttgagagggacagcaaaagtatcagccgccggtacaaggatttcttgaccttgctgatcgcctcgctgatcgtcaaacggttcgtgaaaggcgagaaaccctatacggccgacgagctatccgacgcttaccgcatccctatccgcataacgacacagatcttatacctgctcacggagttgaacatcatcatcgaggtgaactacgggaatgacgaccgtgtggcatactaccagccggcgatcgatgtcaataagatcacggtcagctacctgctgacccgcatggacgagtatggctccgagaactttaagattgacacgagcaagcttttcagcaaggaatggaaagccctgctgaagacacgtgaggatatgataaaggcaaacgacaatatcctgctgaaagacctatagggaattgaaaattgagaattgagaattgagaattaatacaggaaatagggatttgacgagtggggcggtatggaaggtgatcctgcgtttcgctttccctttgctgatcggcaatctgctgcaacaactctataacgtgaccgacagcgtcatcgtcgggcagtttctggggaaagagtcgctggcggcggtatcggcttccttcttcatctattactttattatctcgctggtgatcggtatcgggagcggtacgtcggtggtgatctcacagtttttcggggcgaaggagttcgataaggtgcagaaggccttctcctctttctttatcttcatgttggtcgcaggggtattgctgtccatagcgggaattatttttgccgagccgatgttcaggctgacgaacacaccggaggacgtgatcccgcaggcggtcgcttattttaggatttatgtagggggtacgttcttgtttgtcactttcaatagcattatctccatattgcggggtgtcggggagtccgtgcgccccatgctgtttatcctgcttaccacgattttgaatatagccttggatttactcttcattgtcgttttcaaatgggggatcgaaggggcggcacgggctacggtgatcgcccaagggatcggcatgtgcgtggccctaggctacgtgaacaacacccatcccctgctctctatcaagaaacaggatttattgttcgatatgggactgttcaaggaagggctccgcatcgggcttccctccagcgtacagcaatgtgccatctcgctaggattgattgccttactggggatcgtgaacagtttcggcacggatacgctcaccgcttacggggcagcgggaaagatcgacacgatcatcatccaagcggtattgaccctctctggggcgctagctgctttctgcgggcaaaacatcggagctgggcacttggaccgggtacgtgacggggtacgattcgccatgcttgtcaacctattgctgggtctagcgaccttcacggccatctatttcttcggggacaagatgatgctggctttcaccaaggacccggaggtgatccggattggcaaggaatatttattgatcatgggaggattctttatcgtacacggcggcttgaacgtcttcaacggggcattacggggagctggcgataccctgttcccaatggcagtaagcatcacttgtctttggctgatacgcattcccctcgcctattggtttagctctatctggggacggagcggtatctggtgggccatcggcgccagcctttgcatcgggcttacaatcacctatatctattataaattgggattctggaagaacaaagggcctttacggaagaaataagcatagcttattattcgtttccatcggggtcgcatcgcccgatcgcttgattgaatagagaaaaagtcctcaagtcaatgacttgaggactttttagttgcggaggcaagactcgaacttacgacctttgggttatgagcccaacgagctaccactgctccactccgcgatatagtcgctatcatttcttgattgcgagtgcaaaggtatatattacattccaaacttccaaacattttcaagaaatattttcaatttgtttgcgtacacccttcgctatcgggcagtgaagccttgttaagcagcaatttgacactagaaattctcgatcgtatcaaaaccgaatggttcatataaatgcagacggtttctcaacgattgtatctccgcctgcaaattccgcatccggtccagcatatgatgaatggcctcgattccctcgatgttaatagacaagtcgtaatacatacgtgtgtattgttccagatcacggagctgggaagagaagagatacctctctccatccgtgatattaatgtctatcaaacctccctcttccagcaaaatgatgaacgaagggtctatatggcatttctggcagtattcactgacaataactaaatctgtttgcataatacacctgtttttaatttagactttgtatttcccggaacaaatccttctgtttctccgtcaagttggtcggcacctcgatcgagtacgtgacaatcaagtcaccaaactgcccctccttcttgtaaacagggaatcccttacctttcaaccggactttcgtattgttttgcgtgcccggttttactttcagtttcaccttgctatccaaggtatcgataatctgctcgccacccaagaccgccgtatagaggttcaaggggacggtcaggtacagatcgtctcccacccgtttgaaacggctgtcgtccggaataatgaacgtgatgtacaaatcaccggcaggtcctccattcatgcccggcccgccttggcctttcagcttaatggtttgcccgttggctacgccggcgggaaccgtgatacgcaggttcttgccgttcacggtgatcacctgcttatgtgtcttggccgcatccatcaaggataagtgcaattcggccgtgtaatcctgtccacggaatccatgattagaacggccaccgccaccccggcgggaaccaaacatagactcaaagaaatccgagaactctccatcatcgccggaggaggaccaatacgtacctccgccgttcgagaagccaccgccaaagccgccaccttgctggccatactgcttccgttgagcctcgaactcatccgcatgtttccaattctccccgtactggtcgtatttcttacgcttttccggatcgctaagcacctcgttcgcctcattgatctcctgaaacttacgatgggcgtcgggatcgttcggattcaagtcagggtgatattgccgagccaacttcttataggctttcttgatatcatcctgagaagcgtccttgttcacccccaaaatcttgtaataatcgatataggccataatctgatatgtttagtctatttttctcatataattatataacaataaacataccaaggatagttttggttagtgaaaatttacttaaaacgtttttaatcgtacacgcacggaattaagattgtccgtagatagaaaaggctctagccgggatcatcagataccgctaaagccttttatggataggaaattcttcgaaccttatttaaactgcatcatcttgctgatatacttcccgacaatatcgaactctaggttcactaccgtacctttctcgatctggcaaaagttcgtgttatcgtgcgtataagggatgatagcgacttggaaactgttttgctgggagttgcataccgtcagactgacgccgttcacgcaaacggagcctttctccacggtcatatacccctgccgggccatctccttatcaaaagcgtactcgaacgtatagtaccagctgccgtccgcctccttcacctccgcacaaacggcagtctggtccacgtgcccctgtacgatatgcccgtccagacggccgttcatcaacatgctacgctccaagttcaccttatcgcccactttcaggttcccgaggttcgaacgttccaaggtctccttgatagcggtaaccgtatacgtatcttccgtcatgcttaccaccgtaaggcaaacgccgttgtgagccacgctctgatctattttcagctcattcacgaatgagcacttcatcgtcagatgaaggtttcctttatcggattggagggctactacctgagccgcttcttctacaatacctgagaacataatcaaatcgtttttagtttgtactcccaaaactgttatttattcatgggcaaagataacgcctttgaggtaataagcccgataaaaaggaagttattaaatgtttttaatttacgatattatttatcgtccaaggagaccaaatcataccgctggcttcccatacccaacgcctccgcatgctcgacgatatggatgccatggcgggattccatgcgctcgatcaagtggacacggccagggtccggcgaggcgtaaaccagatctacgcaagccttatccaaggccacgggatcgagtgaggctagcataccgatatccgccattttcggctcttccgggttcgaatcgcaatcgcaatctacggagagtcgattcattacgctgatataaagtatattttcgccacaatgggtagtcacggccttagccgcctcggccattgattccaagaaatgatcctgttcgggaaggttgttccacaagtcggttttcgtcttacccgccgtatgtatccaagcctttccggcggatgaggctataccgatagagatatttttcagcgctcccccgaaaccgcccatggcatgtcccttgaaatgggaaaggacgaccgtaaaatcataatccagataatgggagcctacgaaatcctctttcaggtgtttaccgccttgaaccggaagagccacctcgccgtcggcatccatgatatccaccttagcgatggccgtgaagccatgatcggcggcggctttcaaatggctgtcggtatccgcgcgtccgcctccgtaagccgtgttacattccacgatcgtaccgtttactttctttaccaagtctttgataagtgtaggttgcaggaagttatggcctcccggctctccggtagagagcttcaccgccactttccccttggccttccgtcccaaggcgtcgtagagacggatcatgttctgaggagtgatatctttcaacatatataccttcgaaactccggcagaggattcgcttttcgcaatctccggcctcacttcgcctgcgatactctctacaggtatagaacctgccaccatccatgcgccacccataacgaccgaactccgtatgaagttacggcgtgacattttttgttttgctgtcatgatatagaatttaaattcatatgtttcttatttaatcgatacgcgaagttctttaaaaacttgaaaaataagactcctttacgaacaaaacgaattttgaaagcctaaaaacgaaatgggggttgttcacacggctccgtatcccgtatatcattctaaaacattccttaaagccacttgtttcataaatagattatcctaataatatagatcttatgaaatcaaagaatttaacactggcctctcttttcgccggcttgttcatgtttatgaaccctatgggaagcgaggcgtgtacaagggccgtttacctcgggccggacgatatggtcgtaaccggacgtaccatggattggaaagaggacccgcaatccaacctgtatctcttcccccggggcgtacagagaaggggagcgatatccgataataccatccaatggacctcgaaatacggaagcgtggtgaccgccgggtatgatatcggtacgtgcgacggcatgaacgagaagggacttgtagccaacctattgttcctcaccgagtcatcttatttccgaccggacgataaccgcccggttatggggcttagcatctggacgcagtatgtactcgataatttcgccacggtagatgaggcggttgccgagttaagcaaggaggtcttccgcatcgacgatccggatcttccgaacggggcgaaatcaaccttgcatctctcgatctcggacgcatcagggaatagcgctatcttcgagcacctaaatgggaacttggttatccatgagggacgggaatgccaagtcatgacgaattcccctacatacgataagcaactaaccttaaacgactactggcaacagataggcggcttggtcatgttgccgggtacgaaccgggcttccgatcgtttcgtgcgtgcctctttctatatccacgccatcccgcagacaagtaatttccgggaagcggtagccggggtattcagcgtaatgcgtaacgtatcggtacctctgggaatcacgaccccggatcaaccgaatatctcctctacccgctggcgtacggtagccgaccagaagaataaggtatattacttcgagtctactttaagcccggatatcttttgggtcgatttcaagagcttggacttcaaggcaggtacacctatcaagaaactaacgctcacaaacggcgagatttacgccggaaacaccgccaaagatttcaaggacagcaagccgttaccgttcttgttcgggatctgaagggctagaaaaacagacaagaataaataaggggaggtatcaaaagtcggtatttactccccccttatttttaaacaagcgttattaccttttatgatatgcttaacaattaaagcctatgcctaaagctatccaccggattcgatgtggcagcccggtagctctggaaaaagacagagacaaacgagatcatgaggcagaataagccggcggcgataaatatcagcggacttaaaccgatacgatacgaatagtcggacagccaatctttcataaagtacataataataggtatggcgatcacgaaagcgatcaacacatagttcaagaacgtgaatacgagcttaaccaatatctgccggttgctggaaccaaatacctttcgtacggatacttcttgcaaacgctgttggataaagtaagtggacatcgccaataagcctagcaaagaaataaggatggcgattatcgagaatacgatcacgatctttgccaaacggatttgcgagtcgaatgagttttgtaaactctcatccatgaagaaagcctcaaactcaagtccggtcactttctcatatactttaccgatagcctcctttgcggcgaaaggatcaccttgtgtctcgatcaagatcatccaaggatcttcattatctttcaagaaacggaacatgacagggttcatccctgtcgtcacatttccaaagcaatagaaatcccggacgatacccgctatcgctatcggtctttcttgcctgtccagcataaaagaggccgcatcctccgataagttcatctcacgcatcgcttgctcgtttaggaaccagccctctgtcgttaaatggttatcacgcaaaatctccaatcccagcatatcgtaacactccttatccataacgaattgctgaaaagatatattttgcccctgataagtagcagtccaattattactaccgaataaaggcaatccttgagtcttcccgaccctatctacgcatgacaaacctttcaactcaccgacaaaagcggataactgcctttcatccaccgaccgcatagccaataaattcttcgttttatatccgacaggagcgttgatcatatgaacgatctgacaaaccatcgtgatagaggcggcgatcatcgtgatcgtgatcacattttggaatacgataaagaacttactgaataccattttcgtcttagcccggaacgtaccccttaccacctcgatcggtttagaagaagaaataatgatagcaggcagtaagccggataaaactcccacggcaaccgttaatgaaaccagagccaatagccagacaggtctacccaatacattcatatcgacacgtgtctgcaataaatcattgacaaacggcacgaccgccagcgcaaggagaaccccgataatcaaagaaataaacgtaagtaaagtggactccagcatcaaacgcatgaataactcaccccgtgaagatcccaaaaggcgccgggtagccatctccttcgccctgaaacccgcttgggcaaccgtcaagttaatataattgataaccgcaaaaatcaagataagaagacctacggacatcagcacgatcacgaaacgccaatctccctttcgcaaagaagagtaagaagcggctttcgcaaaatactgctcactaagcggcaatatgcgtacctcctttgccgtcccatattgatacggccaataaaactccttgaaccaatgggccatatcctccgcacgagaagggaaatcactaccctcacgcaccaagacaaaagccgatgtacttccggcattccccaactgatccggggctaagctggggttaaaacagcgaatctgctcccaacgcacgatcacatccgcttcgggaatagaggaatgaagtaaatcctccaccaccccgtttatagtagccgatatggtatctcccaccactaactgccgtcccatcggatcatccgttccgaacatcttacgggcgaacgaagaggagaccaccgcatagttcccggcggccaacgcttgctcacgagtgccttgtaacagccggaaatcaaagaaatcgaagaacgtggagtccgcgaacatcacgttcgcctttagtttccgatcaccggaaactacaactatattgcttgaattatctgccactaccgggcaaactttctctacctccggatagcgttcctttatcttataaggaatggcggctccggtggccatccaattttcattcccgaccagatagatacgatccgccttggtatggaatttatctgtagacatctcctgtaccgtatagaccgctatcaataacacaaacatcaacgatacagacagaccaaacacgtctatcagcgtataagccttattccttccgaggaacttgaaaaaggacttaaagttcaataaattattcatgaattataaattttcaattactcagatttcaagcagttcaccggattatcattagccgtcttgcgggtatccagacaaaccacggaatatataatcaataagacacatacgccgcaacccaagaatatgtaccatgacaaaggtactttctccgtgaattgctcttgccacttttgcaagacaaagtatgctatgccaccgcctaatatgaccgcatagatacagatatatccgatatcctttatgaacaacctcaatatatcccataaggtagccccattcacccggcggacggcgatctccttacgacgacggctcacctcatcattcgtatagcctataagtcctatcaacgtaacaagaagcgtgaccagacctccgatcatcacggaatcacggaattggcgggagtccttatatagatccatgatctcggaacggaaagagatagcgctcagttcacgatccggaaatgtctcggatatcttctgctgtaaacgagccatattatcgttggtcagctcatggaacttcacctgcaaggtgtacatgggcttatgcgcatagaataatacggagggccgcatatcttggttcgagattcctcccagacggatattctcatacacgccgcaaatcgtgaatggctcctcattccatttgctatgctcggtgacgcaaatatccttcccaacaacatcatccgtccagcccgctaccaatttcatcttctccacgaaacggcggtctaccatcacctctctcgagttggtcacattctccgtgaacgagcggccttggatcacgggaatctccatcatgtccagatatccgttgcctacccaatagagatcggcgatattaaaaagctcttgagtcccgcccggtaaaagaatattattaccggaagcatgctcgaaaggcaattgataaacggtggtagccgcagcgactcccggaagccgcatcacctcatccagaatcttggcacgagaggtagagtccacgccagctaacccgcagtaggcaaggttctcataggcatatcccggacgatcattcaccataaacgtatattgacgggcaacgaaaacaagcatcgtcaccaaaaagcccgtagctacaaactggacaagcaacaaggctttcttccagatacgcttattctcccggtaattacggaaagcggaggccaccggaatccgggcgtataatgatcccggcataaaaccagatacgaaaaacaccaagatacatatccctagcaagaccaagctaccattagacaagagcaaggaatctaacgaagtcgccaacaactcctctaccgtacctctaaacgcaaggatcaacaataaggccaagatcagtgaaagcactatatgtaccaacgcctcaccaaacatcataccatgaatattattctcgcttgccccataacatttatggacagccacctccttcgagcgatttacgatagaggatatcacgattaagatatagttcatcaccgccgtaaagatcaaagcgaaggccagtaaggaaagtatccacgtcattcgcttgacttgcggcaactccttgtgtagattatctagcttatgaaatgagaaatcaatgcttaacccgaccttttgctgttcctccggagggaaataagaattcacaaacgtacgcacctgttcctccaaagctaaaggattcacccccttgtgcaacttcacatagcttatgtaacgatcgtttcccaacatattagtaggcgaaccctcccacatgaaccgacccgccgaagccatggaaacaattacatcgtaacgggaatgagaattttccggaacttcctcaaaaacgccaccaatagtcatagtacgtcccggcgaattgtctaccgtgaagtttttcccgataacatcgcctccgatatttttcgctatacgacttgatatcaacacgtacatcggggtggaaagaacctctttcgcatttccgatcaacataggacgaggaagaatatcaaagaaacaactatccgctatgatacaacgaccggagtatttcatcttggtgtcggtcatcgtaaaggtccagtctccaaaactcgtgtatcgggtgacggtctcgatctcgggtatctgttgttgcatagttggagcgatgccaccgcttgtttgcggataatccttcaactcccctccattttgctggtatttcgcccagacttgatagacccggtctctatccggataaaaatcatcatacgattgttcgaaatagactttagcgatcaataccaagcctaccgctaagccgattcccaacgatacgattttcatcacgttatgccgccctttcttaaaaatggaacgaatggcgattagtatgtttttcatattatatcgattttattccagcaccagcacttcattatccttataactctcataactggacacaatcaccttctcaccggcttccagaccttcaagaacctcataatattgcgggttctgacggccgatcttgatagaacgcctgtaagctttctttccatccggatcaagaacaaatatccagcttccgcccgtgctctggaagaaagttcccttcgggataatgatactctcggtaggttgccccagctccaagttgatatagtaggtctgtccactacggatattatccggacgctcacccgtgaaaacgaaatccgtacggaacttaccatcacgaacctcgggataaactttgcgcaccgttaagtcgaaagacgagccttgacgctcgaaagcggcgcttaagcccggtttcacgcggtctatataatgctcgtcgatcatggcctctatcttataatcggaaaggtcgttaatctggccgatcttttgtccgggattgatgctttgccccaatacgacatccaacagtcccaactcaccgtcgatctgggaacggacattcaagttttccttacgttcgcggatcaacaggatattcttccgcatgttcgccaagctggcctccatctcatccatctggatcgtgcgggagatagagtcttggcgcaagcgctcggtaatcaaggcgtgcttttgagaggctaactcgaagtcctccttcgctttcagataatcctccttggcgatcaagttctctttatacaactgctcttgttggttgaacgagcggcgggcccggttcatgtccatatcgtattgaagtttctccatctgattggtcagcttatcctgctccatggtaacctgcgtattacgaaggaagttctgcttctccgccaactcggcctcagcgttcaagatctgcaaatctagatttgagttgctcagacgaacaatgatatcgcctttcttcacttgggcaccctcttccacgactttctcctgtacgataccgccctcctcggggctaagctgcacgaccgtgataggttgcacctgaccatccatacgaaagaagtcattgaattgctcacgggtcacattaccgatgctaatccctctcgcatccactttcaacgtagaagcatgatcaccaaagataatccatcccaacaagataacgaacaacacgccacccgctacataaggaatatgcttcttctgaagacctttctttttctctaattgtatatccatcgtattctatattttttattatcatctaaattctatgttctcaattcttattcattgataagaggcttgcccttataataatccaccagcttgcttttcaataagtacatcaatcgcttttgaagcagattggccttggactccaacagcgtattcgcacttgtctgtacatccagcgtgctcatcaggccttcctcgtacttccgtagggtaacacgataagccaactcatccgatttcaccttcttatccatctgtatggcctctttagcgtatccctcacgatccaggaccgattgctctaccgctgtctgcaactggcgaaagacctctgtccttgtctcccgtgcgatccgcatattgttacggtaacgacgagcgttcgttaatctgctcaaaccatcgaataaggggaagctaaggctaaaagagacatattcaccacggttatttttaaactgatccttgaaaccttccggggcattatcagacttcaggttctcgaaataactcgtagagattccggcattcaaataaatgctcggtagcaactttcctttataaatacgatattggtatttactttgcgttaattgatactcggcttgcaaggcggtagggttattcccggacgcataggcgaaaatctccgccacattctctacttccgggacataattgatatccggtaataaagtatccacctccagttctaaatcagatggataattcatacattccctcaaagtaagcaaggccgtattgaaaagattctgttggtgggtcaatgtataatcatcggctgccacctgagcctcgaattgagctacatccgctttccctttcaaacccagctcttcttgccggcgagtcttatataaggtacggttactctcctccaatttctcggccgccatacgaatcgttcctttataatataccacatccatataagcctgcatagctttcatcgctaaatcatctttcgctttctggatgtcattaactcccatacggcgattggattttgccatcaaccattgattgatcagctgtccgcccgtaaaaataggaatagaagcgtcgaggccatagttattattaaacgtagaagtattctcataggtattggtcgcagggtcaatcgaacggccaaaactatattgcgctccgaccttagccgatgccgccgggaaaaaagaagctacggcggcattccgttccgccttatacgtatctgatgtataaacttgctttttaaccgatggactgttttccacggcatagcgcatacattcatccaaagtccaaagtttctcttgggccaccgtcgccgtagcgaaactgagagaaagaactgttgtaagtaatatttgtttcattgctctattattttctacctaaataatagcaaagaacgtgccaaaacacataaacaactaaacaacaatcagataacaaaaagctattcttttagaactgtccaatattttgacaacgctgtctaattgtttgacactattcccactttgacacgtaagagcgtctcctcttctccctaagtaaaaaacgctctactcctatatgaattcttgctcgatagcctatgaattcttatgcgcatactgtataattctataaaccacgacgtggtctgtacagatcaagacgtggaatatacaaatcacgacgtggtctatatattccacggcgataatctggaaatagatgagatagtaattatatttgtatatagtaagaagaatgttttttacttgaaggtacgaacaattgttttgattacaatcgttgactatcctttagatttaagggcaggacacaaaaaaagggaaacagctgaataccaaccatttccctttttctaagtcggggtaccaagattcgaacttgggaccccctgctcccaaagcaggtgcgctaaccggactgcgctacaccccgttttgcaattcatagtgtttatctctgattgcggtgcaaaggtacgcctttattttaaactacaaaacttttcggtaacttttttcataaaaaatatcattttcttgttgagtggatagaatggaactttgcgtcagatagttcttatcgttggcgtaaataaataaaagggttccattctttatcgtattaataattggcttactgacagatacaggcaacgcagggcaaccaaagctacgtcctaaccgacccgaggaagctgccacagaaggatcggaataagaggcgccatgaattacaatcgccctttgcttagccaaatcatttattcctttttccaatccatttaggataagcgaatagccattccggccttggtacgtattttccgtcagataaaatcctaaagagcttttatgggaaccgttctcgttcgagaaagaggtcgcataattccctccgctattcttaccgtgagaaaccaaagaggtgtaaagtattctcttttgccgtatatccaatacaaccatacgctccgccgtagaaggtttagagaaatcgatcaatgtaaggatatccttatttttccgatcaatcttctcggaacctctaagcccctgcataaacgcatcgaaacaaacccattgatccaatcgcatctcctcatataattggcgccccataaccgccacagacgttgatcccgtttccggagatagggcacgcaaaacgccaccggttgaaattgaacctacagacaagacaataaaaaacaaatacaagaaaatccttcgcatactaaaaaacaataacgccgcaaagttatgatttttattctaatacaaaaacaatcgtctcattaacaggcgcccaatcataaacaaattgcgcatgcgaagtcgcgtttctcacacacatatgagaccggggtgtcgttcccaacgaaggactatattcgatcaacgatttacgaggagcgttgaccggtacgccatggatatacgccccattcgtaaaacggttggcataaggagcgaatccgccagtctccttggaaccgtctaccaaatagatcatgcgagactttttttcttggagaacatacattcccaacggggtttcctgcgcataaggaggacgatgctgtccggtagtcgcagggttcatgctacgaaccaaccatttcgagccgacgtgctccaaggtcgcgatattctggttatgacgatccacgaagatcgccttatcgaagactaccgtatcccctatttgcttgatatatttcttcggagcataccactcctcctccccatcatacacggtttgtatacgagcgaatttagaatcctcatccatcgccttgatacgaaccaagctaccgtcacgtccatagatctcgggaatcacggtatcagtcagcaaataaagcgggacggattgatagcgttctacaccaagcgtatcggaaaccctcttataggcatctctcttgaagacttttacaagaggagcctctccattcctgtttttatagttctgcaagatcgcccattgagacggctccttttggatcgactccaataaggataatctttctttcattttctcccactggaactcccgtgtcgtatctttatagaggtaagtatcttctaaagtatgcttatcgtaaagcagctctttctctatttcgatatggggaggcaaagtctccatgatcacagcggaatccttcgatatagaatccacaggagttaagacctcggtttgagcaggctcggtcctcggcgtacaataacttagcgtacaaaggctcgatatcaaaagtataaaaactgttctcgtcatcattattacccgggatttatttgaatatcgtaaatatacgattttttccaaataacaggtaatcttatcatcttgtttacaaagtaaccgcgccaaatgacagagctatcctatattcatcctataatccatttactgcccggtattaatgagataatctttgtcgccacataacagcagataaatgtacttaccgcaatacatggtatggcggcgacagtaggcaaggctaagtcgtgcttaaacaccgttacccacaatccgagccaaaatatatgcataaggtacataccgtagctgagtttagacatctctgttatgagtcgtggagatttcgaattgcctatgcaagtaaaagcgaggaacgtacccgccgtaagaagcacacagttaatcgtacagaaagcccatccgatctctatctcaggtgtgacaagagttactccgggtatcgcttggacatagaaggaataaatcgtcagcaaggcaccgacgaccatcgaggcgattccgataaccagacgtttagaacggttccatgtaagatggacatgtatataatgtgccagtacgaggtatcctaaataaccggagaagtaccacagtatatggtattcgttccaaaaacattgtccccacacctcgccgaagcaacgattgagatagggcatacaggtcgacaacagaaacaagccgatgaaaaaacgctcttctttcgccgtggctttattcaaccatggcgatattacgggtataaataaatagaggctgatcaaagggtacatgaaccacaaatgtccggcctgtgaaggaaagttcaagaatattctcgatatatctttcaatgatgtctcggcatctatctgcccccacagcaagggtaaagtgctgtatagtatcataaatatgaaaaacggcggtaagatgcgaatacaacgctgacggtagaattgccaagaggtcagccctgccttcatcggcgcaagaagaaaggcggagacaattataaacaatggcaccgccatgcgtgagaaaccatcgtatacggctacccacaaccgatcagcctcattggccagataagattgcggtcccaccatatccgtggagccctcagctccataaaagttttcactggcgtggacaaccatgacaaggaagcacgcaaacacacgcacgtaatccaaaaaaactatacgcttcattttttgttttagtattattattcgttagatgatttcaagtttgtctttttacgcgaagcatgcattcaagagggatatatttcgatgtttttcctgatactgctttatggcgcacaaaggtaaaaaaagtcggaaagaatatatacctttgtcatattataagtgaaatctaaaataaaaacatatgagatctattaatggcgcggttttacgtagcgcattcgcgatggtattagggtttgttttggtattatggccggaagcagccataacctatctggttatcacgatcggtatactattcattttaccgggattattcgctatcctcagctatttcacccgaccgaagaacgagaacggggagaaaccgatgtttcctatcgaggcagcgggaagcgtactgttcggagcgtggttggtgatcatgcccgagttcttcgtgaatatattaatgtacttactcggagccttattggtaattgccggtgtacagcaattggtttcattgatatccgcaaggaaatggagcaatgtaccgttggggttctacctgatgccggctttgatcttgataaccggagtaatgattcttgcctacccgttcggggcggcggcaaatacattcgtaatcttcggtgtagccagcattttctacggggcttgtgagttgatcaactggtataagttccgcaagcgtatagaaaataccggattatgatttccggtattccatgggtgatatacccatatgcttcttgaaaaacttaccgaaagtggattgatcggagaagtggagtatatccgctacttgctgaaccgtggcttgcggggccttcaacagcatcttggcctcgacgatcaaggcgtcgtcaatccatttattcgctgatttacccgttagctctttcaagataagcgaaagatactgtggggtaataaataatttctcggcatagaaagtaacgacgtgctgctccttgcaatgctcgaaaagcaattgcaggaactgctcgaaaagctcctccttccgggagagtgtaggtgccgtcatcagctccttcttacccataaagatattagccaactcgataaagaaaccgactaaggcgttttggagagcctccttctggaaaaaatgggtacgcagcttcatcttttcccgtaagatggagaattggccggatatatgctcagtctcctcggcactcatcgcagcacatggattcttacggatctgcatataatgcaccatagagttctttttccctgccggggtagtatatccatccagaaaagatctggacacgatcaacaaacgccctctcaaatctttgctcactttcgatacctgtatgatatgagtcggcatcaaggttataaacgtattcttctctatcttatatggaatatagtctaccgaaatatcagcagtaccttcctgtaccaagatcatcaacaaggcatttaaacgcatcggggtggaatgctccagccttttttcctcgtaattaatcaaatctccgttcagatccgctatcgataaatcatcttgaaagttgtcgctggactcaattcccttgattaactcagtgacttcaattaaaggtaaatttttcatatctatctgtagatttttattatcacctcggacaaagatagaaataaaaagccaaagaccacccactatttcgtttttaaccaattttcatccaaaattgaacgaataacaagaatttttgacaatatcctgtttcattccataccaataccgtaacagtataaacctttctggttttctaaatatatcagacctttgcgaatagattcgacgggaatatccggtcattggtcgattccaacggacgagtcagcgctttttacttgtatacagggattgccccggctacttttgacgtaacaaaaaagaatatgataaaagaacagattattaatacggcgttcgatcttttttctcaatatggcatcaagagtgtgagtatggatgatgtagcgaaagcggctggcatctccaagcgtacactttacgagtcgttcgaggacaaggaaaccttgctgatcgaggggatcgatcacaataccgaatcgctcggacaatatctgacaggattggaaaaagaacctttcaatgccttggaagtaatcctgctcttctatgaggagatgatgaaaaacccgagatggttcaacgagaagttttacgaggacttgaagaaatatccgaaagcccaacaaaaaatagagatgaataaagcgagaatgggtaagaggtgtatggacttgttcacacgaggcgttaaagagggcgtgttccaaaaggggatcaacttcgagatcatggccttactggtgaaagagcagacgaagatgttgcggccttccaatgtcttctgcaagcattccatcaccgaggtatacaacacgatcctcctcacattcctgaaagggatcagtaccgagaagggaagagcgatcctagaccgattcgatctcaaacaatcctatgatttatagcgaacacttaatgagtttaatcacagacaaaatctatcctaaatgaaacgattattgatgagtagaaaaatgatgttggtcacatttatggtattgccttttctggcggcgagaccggttctggctcaagacaccctgaaactggatcttggaaaagcgctagagatcgcccttagcgagaacccgaccgtaaaagttgccgataaagaaatacagaagaaaaagtacgcacgtaaaggctcgtacgcttctctatttccgcagatcagttttgcgggggactacaaccgtaccttgaagaaacaggtgatgtatatggatttcgacatgggtgacatgggaggcggcagcttgcccgaaggcacggacatgtcgagtatggacgagggcttcgaggtaggacgtagcaacaactggagcttgggcttcaacgcttccatgccactggtgaacgcctccttatggaaaagcttgagtatctcggccttagacgtggaattggcggtggagcaagctcgctcttctaaaatagcgatggtgaaccaagtgaaaaagagcttttacgccgtccttctggcaagcgactcttaccgggtattcaagcaaagttacgacaatgccatggagaattatctggatatcaaacggaagtatgaacagggaaccgtagctgaatacgacttgatacgtgccgatgtgacggtaaagaatacagagcctaatctgttgcaggcagagaactcccttaccttggctaaatggcagttaaaagcgttattgggcatggatctggatttaaatatcgattgcgacggacaactgacggatttcaagtccagcctcttcgccgactatctatccacggatacaaccttatccgagaatacggacttgaaacaattagaccttcaggcggaacagctgaaaaagacgctggtcatgcagaaattcgattatctgccgaccttgtcgctgaccggtctatatcaatggagcgccatgaacaatgacttcaagttcaagaattacagatggaacccctattcgatgatcggtatcacgttatcggttcctatcttctccggaggtagtaaattttataaggtaaagcagacgaaagtctccatcgaccaattaaacctgcaacgggacgataccaagcgcaatttacagttggccgttaaacagtacatagataatatgaatacctgtatcaagaagttcgacgccgcccaaaagggagtcgagcaagcggaacggggatatatgatctcgcaaaaacggtatgacaccggagccggtacatggctggagatgaacgatgccgaacttgccttgacgcaggctcggttgaacttcaaccaatctatctacgactatatggtagcgaaggcggatctggagaaagtattgggtaacgaacagatgaattgaaaattgaaaattaaaaattgaaagtttaatagataataattaggaacaattatatgaagacaagtcaaatgctgaaagtaataccgatagctacattggccctgctgatgtcttgctcgggtaataagagtgaggaagccacggaaacacagaatgagaaagtaaaggtgaaagtggagacggtctctgttcaagacgtggagcaactcagtgaatttaccgctacggtggaagcgaatatcaaaaataatatcgctccccaaaccccattccgtatcgagaaaatcttcgccgaggtaggcgaccatgtaaaagccgggcagttattagccaagatggacgctaccagcctaaagcaagcgaagatacaattggacaaccaagagatcgagttcaaacgtatcgacgagttgtataaggtaggtggtgcttccaaatccgcttgggatgcccaaaagacttccttggaagtggctcgagagacgtataaaaacttggtggagaacacccaattgctaagcccgatcagcggaatcgtaaccgcccgcaactacgatagcggcgatatgtacagcggcggaaacccaatctacacagtggaggaaatccgtccggtcaaattaatggtgaatgtctccgagagtctttttacgaaagtgaagaaaggccatgaggtagatatccggctggatgtgtacggagacgaggttttcaagggtaaagtcaacttggtttatccgacgatcgatcccgctacccgcacgttccccgtggagatcaagatcgccaactcggatgagcgagtgcgaccgggtatgttcgcccgggtgacgatgagtttcggccatatggatcacgtggtggccccggatcgctctatcgtaaaacaatcaggtgctggcgaccggtatatctatgtatgcaaagacgataaggtctcctaccagaaggtgaagctaggacgccgtatgggtgataaatatgagatcatatccggagtggaggatggcgaccaagtggttatcaccgggcaaagccgcctgacgaacggtatggaagttgaaatcgaaaacgaataacagactatgagtttatatggaacagcggtaagaaagcccgtatcgaccgcccttgtatttgtggcgatcgtgatcttcggacttttttccttaagcaggttatcagtggacttgcttccggagatagagacgaacaccatcatggtgatgacggcctatcccggcgccagtgcttcggatatcgagatgaatgtttcgaagcccttggaaaacgtgttgaatagcgtaagcgacttgaagcatatcacgtcgcaatcccgtgagaatatatcgatcgtaacgttggaatttaattatggcatcgatatcgatgtcgccacgaacgatgtccgcgacaaactggacatggtagagtcttccctacccgatgacgtagagaatccgatcatcttcaagttcggtacggacgatatccctatcttgatcctttccgtgaccgcggaggagagcacgaacgctctttacaagatcttggacgataaggtatccaacccattggcccgtatcagtggcgtgggtgccgtgtctatctccggtacgccgatccgtgagttgcaagtgtattgcgacccgtacaagttggaggcttacggccagaccatcgaaggtatctctaccatcatcgcgcaagagaaccggaatacaccgggaggtagcgtagatatcggttctaatacctactccttgcgtgttcaaggagaattcacggacgctaagcagatgctagacctagtgatcggtagccagaacggaaagaacgtatatctgcgtgacgtggcccgtgtagaggacagtatcgaggaacgtgcgcaagaaacgttcaacaacggcacgaaaggtggtatgatcgtcatacagaaacagtccggagcgaactcggtgaacatcgccaagaaggtacaccagaaacttccggagatacaggctagcttaccctcagacgtgaagctggacgtaatcatggatacttccacgaatatcttgaatacgatcgatagcttgaaagagacgatcatgattacctttatcatcgttatgttggtggtattcgtgttcttgggacgctggagggctacgtttatcattatcttaaccatcccgatctccttgatcgcttctttcgcttatttgctggcctcgggcaatacgttaaacattatctcattgagctcactttctatcgctatcggtatggtggtggacgacgctatcgtggtattggagaacgtaacgacccatatcgagcggggtagccagccgaaacaggccgctgtacacgccacgaacgaggtggctatctcggttatcgcctccacccttacgatgttagcggtgttcttgccgttgacgatggttacgggtatggcgggtatcttatttaagcagttgggatggatcgttagtatcatcatgatcgtttctacggtaggcgccttgacattgaccccgatgctttgctcacagttattacgccagcaaccggagaagggtaaattgtaccggatgttcttcacgcctatcgaaaagggattgaacgccttggatcgcggttacggacgcttcttgaactgggccgtacgccaccggaaaacggtgatcgtaggcgctacgctgatcttcatcggcagtatgatgctgatcccggttatcaagacggaatttttcccgacacaagataacgcacgcatcggcataacgattgagttgccgatcggtacacggcaggatattacccgtgagttagctctcgacatcgacaagaagttccgtgagaaatatccggagatcctaatcagtaacttcacggaaggtacggcggatacggataataccttcgcccagctaagcaataacggtacgcatattatcgagttcaatataaacctaactagcgtgggcgaccgtgagagaggtcttaccgagatttgcgagttgatgcggcaggacttagcccaatacagcgagatcaagaaattcgaggtactcgccggagggcaggaaggttctatgggtggagagacctcggttaacatcgagatctatggttttgatttcgcccagacggatgccgtggcgaatgagatcgcccgtcgtatgagaaatgtaaaaggatgctcgcaagtaaatatcagccgtgaggattatatcccggaataccagatcgacttcgaccgggagaaactggccatcaacgggctgaacgtaacaaccgcctctatgtatctccgaaaccgtgtaaatggttccaccgcttcaaaatatcgtgaggatggagatgagtatgatatcaaggtacgttacgccccagagttccgtgagtccgtagaggatcttgagaatattttgatctataacaatgagggcaaaggcatccgcatccgtgatttaggcaaggtagtggaacgtatgactcccccgaccatcgagcgtaaagaccgtgagcgtgtgatcaccgtatctgccgtagcgggtaagggagcggcattgagcgacttggttgccgccgcccggaacgagttgaaacaaatggatatcccatccgacgtaagttggcagttgggtggaacattcgaagatcagcaggatacatttaccgatttgggtatcttaatggtattgatcatcatcttggtattcatcgtgatggctgcccagttcgagtcgttggtagacccgttcgtgatcatgttctctatcccgttcgcctttacaggtatcgtattgggattggcggtcacgcagacaccattgggcgttatggctttgatcggcgtgatcatgttgatgggtatcgtggttaaaaacggtatcgtgctgatcgactatacgatcttatgtcgggaacgtggcatgggtattatcacatcggtagtgactgccggaaaatcccgtcttcgcccggtattgatgacaacattgacgaccgttttgggtatgatcccgatggcggtgggaaccggcgagggttccgagatgtggcgctcgatgggtatgaccgtggcttggggtctttccgtatccaccttgattaccttgattattgttccgacggtctatgccgtattcgccgccaacggcgtaaaacgaagacgccgcaaaataagaaaggcattacgaaataattaattatctttgcgtaccatagggaagccgaggccaagcaaacctcgatgggcattgttaggtcgtgacaatgcccattgtaaggtgcttacgatgcccattataaacaggcttgaatgcccatcgcaagaaaagcctccctacgggtatgcgatctcataaaaaagcaactatatgaaagcgatatttatatctttcaatcaagcgtattacgagaccatcgtcaatatcatggaccgtaataaccttaaaggttttacctattgggatgtcgtgcaaggacggggaagtaaaacaggcgagccacattacggcaatcacgcttggcctaccttgaattcagctatccttacgatggtagaagacgagaaggtcgatcattttctggaaatcctacacaacttagacaaggaaacggaagcgcaagggcttcgggccttcgtctggaatatagagaaaactatctaacttaatttttcggaacaactatattaatctattgatatggacaaatcaatcctgtttacacccggtaagatcggtccgctaacacttaggaaccgcacgatccgggccgccgcattcgagagtatgtgcccgggaaacgctccctcggagcagttattcaactatcatacatccgtagccgccggagggatcggcatgacgaacatagcttatgccgccgtgacgcaaagcggcttgtcgttcgagcgtcagctgtggatgcgtccggatattattcccggcctccgcaagctcaccgacgctatccataaagagggagccgccgcttccatccagttaggccattgcggtaatatgtcgcataagcggatttgcggatgcacgcctatctcagcgtccagcgggttcaacctctactctcccacgatcgtacgaggtatgagacaatccgagatcgcttccatggctcgtgcctacggtgaggccgtacgattggcacgtgaggcaggtatggacgctgtcgagatccatgccgggcatggttatctgatcagccaattcctttccccgtacaccaaccaccggaaagacgagtatggaggaagccttgagaaccgtatgcgcttcatgagaatgtgtatggaagaggtgatgaaagcagcaggttccgacatggccgtaaccgtaaagaccaatatgcgggacgggttcaagggaggacttgaaatagacgaatgcctagaagtagcccgtacactccaagaccaatgcggagcgcatgccttagtactaagcggcggattcgtgagccgtgcccccatgtatgtaatgcggggagaaatgccgatccgtacgatggcgtattatatgcctaggggctatctaccgattggaatccgcatggtgggtaaatatatgattccctcggaaccgtttaaggaggcttacttccttgaagatgcgttgaaattccgcaaagccttacatttacctcttatttacgtaggaggattggtctccagagacaagatcgaggaggtactgaacgacgggttcgagtttgtggccatggcacgtgccttagtgaacgaaccgggcttcgtcaaccgtatgaaagaagacgagcacgcccgttgcgattgtgggcatagtaactattgtatcgcccgtatgtatagcgaggatatggtctgtcataagaacgtgaaaggtcttccggaatgtatcgtacgtgaaatcaaaaggcttgaatataaataatggaaaagaaatgggctttagtcacgggggccagttccggaataggtctcgcctatgccgaggaactagcctcacgaggctatcagttagtgatcgtcagcaatgaggaacaggcgatccgggagaaaggtgagtttctctccgagaaatatggtatagaagttttgccgctttatcgtgatttggcgatccccggggcggccaaggagctatatgatacttgccaagagaaaaacatcccaatagaggtattggtcaataacgccggtatgttttttttctgcgagaccttacaagctaaggccaacatcgtcgagaaaatgctctacctccacgtgaccactcctacccagctttgttattatttcgggcaggagatgaagaaacggcgtcatggatatatcctcaatatgtcatccctatcttgttggctaccttatccgggaattacgctgtacgcttccaccaagcgatacttgaaaagcttctcccgaggcttgcgttcggagttactggattatggagtaagcgtaaccgtactttgtcccggtgccgtcgccacgaatttatataacctaagcgacaacttaaagattttagcgatccgcctaggtatcatgatgcgtccggaaaaactggctaaaaaagggattaatgccttgtttcaccaccgggcttccctattaccgggtctcttcaacaaaatatgcacacccctcgtaatgctcctcccccacggccttgtccgttggatcatgcgaaccacgaaattagtgaagctggatcgacaatccgacaaataacatgcgaaatatttgtcacatcaaacaaaaatcgtatctttgcaccgctttttagccccgtaccgtgtgatgggaaattaggaagcaaaataactaattttgagtaacacaaaaattaaagaaaatgaagacatttgagttagaaggaaaaggaagagagatcgtcgctcgttccgctgatcagaaaagagccttgaaagcaatgcgtaagaacaatgaaattcccgctgtattatacggtggcgaaaaagtaactcacttcacggttacaaaagaagccgttcgtaagttggtttacactccggagattttcgttgttgagttaagcattgacggtaacaagacgatggcaatcgttaaggacatgcagttccaacctgtaactgacgagatccttcacatggactttttggaagtatctaaggacaaagccgtagtaatggaagttccggttgttttggaaggtcacgcagaaggtgttaaagccggtggtaagttgtctcttcaaatgagaaaactgaaagtgaaagctatatacgatcaaatccctgaaaagttgacgattaatgtggatcaccttggcttaggtaagactatgcaggtaggtgctttgcacttcgaaggtcttgaattgatgaacgctaaaaacgctgttgtctgcgccgttcaattgactcgtgccgctcgtggtgctcaggctaaaggataatctgaggtaaaaacattattacaatacatgaaggggaggatattcatagaatgttcttcccctttcttttatagattcgaggataatgaaatatttgataacaggacttggtaatatcggttccgaatattggggaacccgtcataatataggtttccgggttgtcaaccatttggtagagagcgtaggaggcaatttcactgaggagcgatacggggcaatcgcacgcatacgggtgaaaaactgtgacttgatcgtgctaaagccgaatacctttatgaacctcagcggcaacgccgttcggtactggttgcaaaaagagaacattcccgtggaaaatctattgattgtcgtagatgatctggcattgccattcggaaccttacgtctgaaaccaaagggtagcgacgccgggcataacgggttgaagaatatcgcccagttattgaatacgcaggaatattcccgccttcgtttcggcataggcagcgatttcccacggggcggacagatcgattacgtgctagggaaatttcccccggaggaattgcaattgatgccagagatattggatcgtgcgacagagatcatcaagagcttctgcctcgccggcatccagattacgatgaatcaatttaataataaataaaagagactgagaatacagatatgaacgaggtacgtatcgataaatggatgtgggcgacccgtatctttaagacccgcacgatagccgcggaagcttgcaagaaagggcgtatcatgataggtggagtaacgatcaaaccttcccgcatgatcaaggttggcgatgtgatccaagtgcgtaaaccgccgatcaccttctcttttaaggtaatcggattgatcgagaatcgtgtgggcgcgaagctcgtcccgaattacttggagaacgtgacaaccccggatcagtatgagattctggagatgaaccgtatctccggtttcgtgaaccgtgcgaaaggtctcggacgtcctaccaagaaagaccgtcgtgaactggagcaattcactgagccggaattcatggatgacggattcgatttcgagttcgactttggagaagaggatgaggagtaagcatgctgatttccactcaattacatttaccaatattttcatcaagaagtaaaagtattttcacctagaggtaaaactgtttacatactgatgtaacgacatttacctctagaggaaaaaacatttaccattagaggtaaatgtcgttacaacggtatgtaaacggcaattattcctattgattctcctcggaaagcagattcccctcctcatcccagctacgccagacaccagatttcttccctgccgtatagaacatctcatacaacaaatttcccttatcgctccagatacgccaagggccgtccttttgcccttccttataagaagccaggccgatcagctggccgttatcgctatacgtgcgccattcaccatggaagatcccgtgatagtaggaacgcacctcggcgatcttgccatccggataatagatcacataggttccctcgggacggccatccttcaggtacagctccatcttgagcatgccatcctcatagaattccgtatagcggcccgtatacggggtggtttgtgtctcatcggtataatactgtccctcgctcaataccaagtcttgcgccagcacggtccaagaggctcccgccaaaaaagcggaaagtaacaatagctttttattcatgatacattcttatctaaattatacataaaaagacaccgagggatctttccggatacctcagtgcctttaacaaattcacaacctattcaatgccaagcttgattaatattcggtattttgaggatcccaattagtccaaccggcagtccagtcattctttccgtcgaaagcacctttgtaagttactttttcgaagaagctgttgttcaatacctcatcgacaaattcagcgccttgcacagctgaagctacgacagaagagtaatcaccatctttagagataatctcgttggtcgttgccagagtcgtgttgctaccggcaagattgaagaagttctcacttaccttatcatcctcatagaagttcttccacataccagcaaagatcacattcttgatggcgatgccatcgtttgccgtacctttcttatcagtagcacgaagtccgtaaggccagccggtgaatacggagttgtaaacattcaagctggtattacgacgcaggtgcatggctgcctggaatttaccacccttagcaccgttagcagcgtcggctgtcttggcttccacctcagcctgtgtcttatcggataccttgccatagaaaggacctatcaaggttacgttggagaagaccggcttggtaagcggagtgttggaagaaccgtcaccgtcgttatcagattcaaaaccgttagagtctgaagtatcagcgatattcttatcacgtacgctcaacaagaattgcagtttacccgtataaccgaagtctgtatcgaaatcatcatcccagcctttgtaagcgatcaagtgtttggcatttaccgttccaccgaaccattcgtaagaatcatcgttcgaaaatgaaacctgaacgaactccacttccgtgccgctaccaacgccgccgaaggttaagccattgatttccttgtctggctccaaaggataaccggcgaactcgatacgaacgtatttcaatttaccggaactttccgcattaaactcatcggaggtcgtatttccatataatgtaccaggtcctccttcgatagttggttgattggtacgattcacacgagcgttaccacaaataatcagaccgccccagtcacctgtcaaacgtttacccggctctttatcggacgtaaagacgatcggtttgtcaacagtaccttcggcgatgatcttagcgcccggctcgataatcaaggaagcggctttctcgcccggactaacggacacacctttgataacagaaccagcctcaatagtcaatgtagcgcctgatttcacgtatacgaagcctttcatgaagttcttgtcggcagcgttgatcgttagatcagccgtgatatttccttccaatatcacctctttggaagacggagcatcattagagacagtcacggtacaagtagccgttttaccgccatccttcgtagttacagtaatcgtagcggaaccttcggccacggctgttaccttaccggcatcaacagtcgctaccttttcatcggaagtactccatgtaaccgttttatccgtagcgtcacttggagtaatagtcgcagacaaggtagtggattcgcccaccttgatagtagcggtagtaggactgactgccacagccgatacggctacggagccatcaggtttatcatcgtcatcactacacgatacagtcccaaacataacggccatcgttaacacagaggccaaaccttttaagagaaatctgttcataataaaaacattttgtttgtaatatatatatattcaattaaacatcaaaacctaagggaaacaccgatattgatatccactcccgggcgatagctgcggatcagttgctcacgctcgctcttgccgcctttgtcgtctgtcagtttcacgaactgcttgtactcgaccttggagttcaatatatcctggattcccgccttgatctcgacaatcttgccaatcttcttcgagaaagtaagatccaacgagttgcggggcatctcatatatatcagggatatcctcgtcctggttctgcatcgggacaccgaccgactcaatacgcttcccgatccggttatagagcagggaggcggaaatccccttgtcatcgtactggtagaaaaaaccggcattaaccaagtagggagattgccctgccaaagggcgatcccgctccggtgccccttcctcaaaacggacacggctatagatatatgcggcattgcacacaaagctcaagcctcgcagccctataaagtcgaggttctttttaacgtccaactctacgccgaaggtctcggcgttcttcgcattatgataggtatattgcaggccggaaccagcctcgttgtacgtctcctcgataggatccttgaagtgcttgtagaaaccgccgatcgtgatcatctcgcccgcggcgggatagaactcataacgaagatcgatattgtcagcgtaagcgttcttcaactccgtattacccacgatgtttgcgtctcgctcgaagttgaagtacacgtaaggcactacctctcggaactccggacggttgaccgagcgaccgtaagcggcgcggaccaaatgtttttgtgagaggttgtaggcaacattaactgaagggaagaaatccgtcgtcttattatccaagtgtaccggagtagtaccgtccgagctatatccgtccatcttcaattggtagtattccatgcgaacaccgatattagcgttcagcacctccccatagttcaatttagcggagacataggcggctcccaacatgttctcggaagtataagagtcactgttcgtagttgtctcacgcatccatatcttatccgccgagatattttcgtcggcgaacaactccgtataatcccagtccgcataccggtcgtagccgctacccaacaggttgtagccaaagcgacgggcagcgaaggtacggctcttatattcaccgtagacacctccattgagaacaggagcgaacctatcggatacggtgaatttatgttcgtagttggcggctagcgaggcgctgtgatccttcaattcttggtaataacgcatcgggtcagagacatagtagttcggctgttccgtacggttctcgtcaaggatggagttcacgatcttacgatccggctcacggtaggaggcgaaggcatagcccaccgtccaatccaccttgttgacattttctcgcaaggtatgcacaccgctgatctgcccagagtaagtggtacgcccggtatagagggattcccatttacggatatccttgtcggaataatagttcattccttccctttgtgtcagagcggaaacgccacgctggctgaaaaagttgcgaagctcatatttactgccatcccgttggaatgaccagttaaagagggcccctagcttggaggtatttttatagcggatatcgttgtactcaaagcggggacgagatacgtcgttcttcacgtcgtaggcgatgtagttgttattcaccgtctccgagtaatcgaactcggtactccagttcaagttcgtgatatttccgatcttccagccgcccacatcataagagcggtgcgaggtaagggaaatcttctggtcggggatggcggtgaacttgttgatcccccaacgttggttgatttggcgggtaaaggctgccgcctcatccgtggagtgttctcctaaatgggcggggaaagaggaaggcaggtttctcacgtccgctccgaatccaaggtagtccttcgccgtgccgtccgtcagctggaagttacggaaggtggcgttcgtgttaaagcccatttggtaggatacgttgaaggtgttcccgtccgggatattcttggtcatcacccgcacgaaaccgccggagaaatccgccggaagctcggccgagggactcttgtagatcatcatgttatcgatcaaggaagaaggaagcacatcgaacgagaaggcacggctgtccgtctcgctggaaggggtcgtggcattgttcagccatacattattataacgttgcgccagaccccggaccacgatgaaacggtcgtccacgatggtgattcccgggatacggcgtagtacctcggcggcatcgctatcctgtgttttactgatttgctgggcggagataccattcacgaccggaaggctcttgcgtacggtatttaatacggccatctcggttcccaatttccgttgggccactacgaccacattctgtaattggaggttagcatcggaaagctcgatattcaacaccgcctcttggcatgcgactaccggaacatcctttaccgtttgcgtttggtacgacacgtaagaggcggctaccgtataagtacctggtttcacgttctcgatacggaaattaccgtctatatccgtgatagcgccaaccgtagtcccctcgatcacaaccgaggcgccgatcaacggttcttttatctttgcgtccgtaaccgtcccgcaaataacccctgtttgtgcccatagagagaatgacaggaaaactcccacccagaaaagccctaaccttttcaatcttttgccccttaaactctttcccattatcttactacttattatttcatctttgatttcgacgcaaaagtacgggggcggtatttcaaagatgtttagatccaataacaatgaagacaacaaatgttacatttttaagaccgcaacttttccttatcgtttgacatagctaacgtatttttactacatttgcactcctgaatgcataaagacatttaataacatgaagaacattaaaattttcccgaaagactggttgcagttgcatccctataaacaaagcactcccgtggattcctattataccggaatagcgaaccgtatctacgatatcatggagaagaccgagttggtaaactccttcgagggcgaggaaacaaagcagatctgtatccgcatggccgcctacttcgaagacgtgatctccggcatggggctttggcgtgccttcatccttacccataaggagctatacggcaaatacctccccttctacactccggacgatcattattacgacgatgaggtgaaccttgaggacgtgcgtttcctcctttggcattatacccagcagtatcacggctatcgtaaaggcactttcgtcagtccggacaaccctgccaacgaatccaccggcatgcttatctacgacctgttctgcaaagagtggaccacggcgccggagaatacccgcatggccaagcttttcgcccttgatacccgctacgagcggcaagaggattacgatcgtctattgcaatggttccattacgaatcctatatcctgcctgagtcggcccgggaactgagcgacttcgcccacgaccgctggaaggagcagcccgacctcaaccaagagcagcttaacaacctgctcgtcaacagccacggcatgatggcctacaccagcaagacctccttgctaggtctgacctccccgcaatggctggcaaagatattgcccgccgagcatcccgaccatgcggtatttcagaacaccgccgacgagtctgtagccaccctgcccgacgatatgctggaggaaaaccgccaacaatacgagactttccgcaaagccgcaggtgacaaactgcttctctatttcgacaagaccgaagatgcacaaacatttatcacggagacttccggccttatccccgccgagaacttccatcttcccgaggactggcaaggcaagaagctggcgatctacgccacgcccgaggaaggcgcccaagtcattacccgtgacgtggagctgatcaaggatgagaacaatcccttctacgacgccaaccgtgccgccaagcaagcgctctctttcttcatcgtgaaacattgcagcgtttacttcctgcctgagctggtaaagcgaggcatgctggccgacgcgcaaacgaaaagccttaccagcccggaacgtggcaaggcgatcatacaagagaattggaagttcctagcccgctatttcatccgggaatatcccaatagataaaacagatagaaagcaccatcgcaatccgcgatagtgcttcttttttagctcatctttcatttagcaagtccacaaaccaaatacctttcaaataaaaagaataaacccagtaaattattacaaatagaaacatcagacaagatattcttatctttttcccgctctttcgtcccggcaagcaatcacattatgtcattaatacctatatttgcaaaacaaattgacgcaataattatttatacacaaacataaggtcagcaaatgaaaacaaacaagaatcattttaacagcagacaaggattatacgacccgtcttatgaacatgacgcttgtggagtaggaatgttagtaaatatccacggcgagaaatcgcacgacatcatcgaatcagcccttaaggtactagagaacatgaggcatcgaggcgctgagggagccgataacaaaacgggtgacggagcgggaatcctattacagatccctcatgagttcatcctcctgcaaggaattccggttccagagaaaggcaaatatggcaccggactaatctttctccccaaagacgaggaacagcaagcaagcatcctcagtatcctcatcgaggagatcgagaaagagggattaaccttgatgcacttacgcaaagttcccgttcatacggaaatcttgggaaaggacgcacaagcgaccgaaccggatatcaagcagatattcatcatcggctgcaacgatcagcaagagctggaactaaagctatacctcatacgtaagcgggtcgagaaaagggtatcggccactgaccttccggccaaggatgatttctatatagcgtctctttccaccaaaaacatcgtttacaaaggcatgctggaatccatgcagctacgccattactttccggacctgacgcaaccttatttcactagcggactggccttggtacactcacgtttcagcaccaacaccttccccacttggagtctggcgcaacctttccgcctactggcacataacggggaaatcaacacgatacggggcaaccggggatggatggaggcccgggagagcgtactatcctcccccagaatcccggatatcaacgatatacgcccgatcatccagccgggcatgagtgacagtgcctcactggataacgtattggaattcttcgtggcctccgggatgagcctgccgcatgccatggcgatgctggtaccggagagtttcaacgagaagaacccgatctccgaagacctaaaggctttctacgaatatcactccatcttgatggaaccgtgggacgggcctgccgccctgctctttagcgacggacgctacgccggaggcatgctagaccgtaacggtctccgccccgcccgctacctgatcacgaaacatgacatgatggtcgtggcctccgaagtcggcgtcatggatttcgagcctaacgagatcaaggaaaaaggccgtctgcaacccggaaagatcttactcatcgataccgagaaaggcgagatttattacgatagcgagctgaaggaaaaactggcgaacgcccagccctaccgtacttggctggagaaaaaccgggtggaattagacgaattgaaatccggccgtaagattcctcataaggtagagggatacgacaagctactgcgtacgttcggatacagccgtgaggatatcgaacgtatcatcgtaccgatgtgcacgggaggggcggaaccggtcggctccatgggcaacgatacgccactggccgtattatccgcccgtccgcaaatcctctataattatttccgccaacaattcgcccaagtaaccaacccgccgatcgacccgatccgcgaggaactcgtcatgagcctgaccgagtatatcggggccgtgggaagcaatatcttagttccaaccgagagccactgtaaaatggttcggctgaaccatccgatcttgaccaatacacaactggatctcctgtgtaacatccggtataagggctttaaaagtgttaagctccccactttgtttgacgcagagaaaggatgcgcaggactgaaagctgccttggacgaattatgtaagcaagcggagcaatccgtcaccgatggcgttaactacatcattttaagcgacagaaacgtagatgagaaaaaagcggtgattccctccctgttagcggtaagcgccgtgcatcaccatctgatctccgtgcagaaaagggtgcaaacagcgctggtagtggaaaccggcgagatgcgtgaggtaatgcacgccgccctcttactaggctacggagccagtgccatcaacccctatatggctttcgctatcttggatgatctagcagacaggcaagagatacaattgaattacgagactgccgagaagaattacgtaaaagccatttgcaagggtttattcaaggttatgagcaagatggggatcagcacgatccgcagttaccggggagcaaagcttttcgaggcgatcggcctaagccgggatctggcagatacttacttcgggggaaccaccagcaacatcggtggtatccgcttggaagagatagcggcagacgcgatcgccatgcacaatgacgcattctcccaccccacggattctttattggaacataaaggcatttattccttccgcaaggatggcgagaaacacgcttggaacccggacaccatttccatgcttcaactggctacccgcttggggagctacaagaaattcaaggaatattcccatacggtcgatgagaaggaaagctcgatcttcttgcgtgacttcctgacattcaagcgacgcaccccgatccccttggagcaggtagagccggaagaagcgatcatgcgtcgctttgtcacgggagcgatgagcttcggttctatcagccgggaagcgcacgagacgatggctatggccatgaacaagatacacggacgcagtaacacgggcgagggtggtgaggactcggcccgtttcgtcccccgtgaggacgggttatcgctccgctccgccatcaagcaagtggcctccggacgctttggcgtgaccacggaatatctggtaaacgccgacgagatccagatcaaggtcgcccaaggagcgaaaccgggcgaaggagggcagctccccggctataaagtgaacgatatcatagccaaaacccgtcactcgatcccgggaatctctctgatctctcccccacctcaccacgatatttactcgatcgaggacttggcgcaattgatcttcgatctgaagaacgtgaaccctcaagccgagatcagtgtgaaactcgtatccgagagtggcgtgggaaccatcgccgccggtgtagccaaggcaaaagcggaccggatcgtgatctccggggcagaaggaggaacgggggcttccccgataagctctatccgttacgccggaatcccacccgagctaggactatccgagactcaacagacgctcgtgatgaacggcctccgggggcaagtccgcttgcaaacagacggacagttgaaaaccggacgggatatcgtattgatggcgatgctgggtgccgaggagtttggattcgccacctccgccttgattgtcttaggctgtgtgatgatgcgtaaatgccatatgaacacgtgtccggtaggtgtcgctacccaagatgaggaattacgtaaacgctttcatggccgacacgaatatttggtgaatttcttcaccttcctcgcccgtgaagttcgggaatatctggcagagctaggctatacgaaactagacgatatcattggccgtacggacttactcatgcgtaaaccttccgatcatatcgagaaacatgatctattggatctcagccgcttgatccatctaccggaacaagccgccacgcaggccatccatcatgtcacccgtcaacttcatgcgatcgacaacgtgaaagatgtggatataatccgtcacgcaaaggccgccatcgaatccggacaggaagtatcgttggattacgcgatagccaacaccgatcgttccgtaggagccatgctttccggcgagatcgccaagcggtacgggaacatcgggttaccggagaacaccctgcatatcaagttcaagggggcggcgggccagagcttcggagcctttctggctcacggcatacatttccggttggaaggcgaggcgaacgactatctcggaaaaggattgagtggcggacacatcagtttaatgcctccggtacgctccacctttatagcggaagacaatacgatagccggtaataccttattatatggggctaccagtggtgaggtctatatcaacggccgggtcggagagcgtttctgcgtgcgaaactccggggcgatcgctgtcgtggaaggtgtaggcgaccattgttgcgagtacatgaccggaggccgggttgtcgtcttaggcaatacaggccggaacttcgccgccggaatgagtggtggtgtcgcttacgtgtggaacaagaatggtgatttcgattactattgtaacatggaaatggtagagctttccttgatcgaggatagcacctcacgaaaggaacttcatgaattgatccgcaagcattatcatcataccggcagccatctggccggattgatgctcgataactggaacaagtacgtggatgagttcatccagatcgtcccgatcgaatacaagaaagtactccaagaggaacagatgcgcaaactccaacgcaagattgcggagatgcagaaagactactaaatatttacacaaaaacaagagaactatgggaaacccaagagcatttctaacgatacatagacaagaggcgggctatcgtcccgtccacgaacgtatagatgatttcagcgaggtagaacagaccttgaacagcggcgaccgccgtacgcaggcctcccgctgcatggattgtggcgtacccttctgccactgggcctgcccgctgggtaacaagcaacccgaatggcaagatttgttatacaaaggccgttacaaagaggcatatcacgtattagagcagaccgacgatttcccggagttcacgggacgtgtctgccccgccctctgcgaaaaaagctgcgtactgaaacttagctgcgacgaacctgtcacgatccgtgagaacgaggcggctatcgtggaagccgctttccgggaaggatacatacagcctatccaaccggtacgcaacgggaaaaaggtagccgtgatcggtagcggtcccgccggattgaccgtagcgaaccaattgaaccgaaaaggatatgaagtcaccgtattcgagaaagatgagttaccgggcggcttgctacgtttcggcatccccaatttcaagctaggcaagcacattatcgatcgccgtatccgcatcatggagcaagaagggattcttttccgtgtaaacacgatggtcggcaaagagatattagcgaaagatgtagtgaaagatttcgacgctgtttgcgtagcgatcggcgccgaggttccccgggatctatctatcgagggacgtcatttaagaggcgtacatttcgccttggagttattaagccagcagaaccggatcttagaaggcatcccgatccctcccaaaagccagatcaattgtaagggcaagaaagtcttagtgattggcggaggcgatacgggtagcgattgcgtagggacagcgaaccgtcatggggcggcctgtgtcacccagatcgagatcatgccccagccacccgtcggacagaatccggcgacaccttggcccatgtatccgcaagtactgaaaaccagcagcagccatgaggaaggttgtatccgccggtggaacctagcctctaaccgttttatcggagagaaaaacaacctgataggggttgaggtagaagaagtcgaatgggttccctccccagacggaggccgtccgcaaatgagacagaccggcaagaaagagatcatcgaggccgatctggttttcctcgccatgggcttcctgcatccagagcaagaaggattgatcaaagaactgcgattggctaccgacaaccgcgataacatcgccgtagacaacaccggatataccgccaacagcaacctattcgcctgcggagacgctgtcagcggagcgagcctagtcgtaaaagcgatggcctccggccgtaatgtcgcccgatccatcgaccgtttcttacaaaccaactaattttcaactttcaatttttaatgatcatgtgtggtataacagcgatattcaatatacacgacggagcgcaagccctgcgtaaacaagcgttattaatgagtaaacgaatccgtcaccgggggccggactggagtggtatctaccaaggcaaaaccgctatcttggcccatgaacgcctttccatcgtagaccccgcctccggaggacaacctttggtcagccccgacgggaaactcatcctctgcgtcaacggagagatctacaaccatcaggaattacgagaacggttaaaaggcgattacgagttccaaaccggctccgattgcgaggtgatcctcgccttatacaagaagaaagggattgatttcatcgaggatctcaacggtattttcgccttcgctctctatgacgaggagaaagaggtttacttgatcgcccgtgacccgatcggcgtgatcccgctctacatcggatacgatgacgagggacacttgatggtatcttctgagttaaaaggacttgaaggcttcgccactcattacgagccgttcctccccggtcattatttctatagcgaagaccgtaaactcacgagatggtacacccgtgactggatggattacgccaacgtgaaagataatcctaccgacgtacaacaacttcacgatgcgctggaagccgccgtcaaacgccaactgatgagcgatgtcccttacggcgtccttctatccggaggtttggattcctccatcacctccgctattgccaagaaatacgcggcgaaacgcatcgagaccaatgggaaagcggacgcatggtggcctcaactccactcgttcgccatcggattgaaagatgccccggacttgatcgccgcccgtaaagtagcggatgcgatcggtacggttcatcatgagatccattatacgatacaagaaggattggacgctttacgagatgtcatttatcatatcgagacctatgatgtcactaccgtccgagcctccacccccatgtatttattggcccgtgtgatccggagcatgggtatcaagatggtactaagcggcgagggtgcggacgaggtattcgggggatatttatatttccataaggccccgaacgcacaggctttccatgaagagaccctgcgtaaattaagcaaactgtatttatatgattgcttgcgcgcgaacaaaagcctttgcgcatggggcgtagaaggacgagtgccgttcttggataaagagtttcttgatgtggccatgcgtctgaatccggtggcaaagatgtgcccgggtacgatcatcgagaagaagatacttcgagaagcattttccgacagcttgcccaaggagatcgcttggcggcaaaaagagcaattctcggatggggtaggctatggctggatcgatacattaaagaaaataacctccgagtcggtcactgatgaagagatggcgaatgccgccaaacgattcccgatcaatccgccccaaaacaaggaagagtattattaccgctccatctttgaagagcatttccccagcgaaagcgcggcgagaagcgtaccttccattcctagcgtagcgtgttctaccgcagaggctttagcttgggactcggctttcaaaaacatgaacgagccaagcggcagggccataaaaggcgtacatgaatccgcttattgacgaatatttcttttctttagtagcaaaatgcaccaacttttatgaataataaacgctggtgcatttaatttttataataactttgccagctagagtcataaaacactttaaaacaaatttatatgaagaaaatctttacatgcattagtttggcagccgctacattcatggctaccaccccagtgatggcacaacaacaaaaacaattaacagataaagaaaaggctgctgttgttaaagttattgttcctgccgtttttgatcaagtaaagcaaattagtggagttgatttcatgtctctcacaaatcctaatatcgaaagcataattaattcccctttatttttgcctcaagtatcaagcctacgtgcagatcaattaaatccaatctcggttactcctgatagtttaaaattggatcttagttctatggatttttctgcgatagcaccgggaatgggtgatttcatcgcagggatcgttaatgacgtaaaactgacattcagtgattataaagaatataacgtttcacttaacggacaatccgtaaaaattgatttaccagagaaaattgatgtatccgctgctgctttagttgacgcagaaacgggtaaacccacaaatttattatcggtattaatcaagaccgggaacaaaggaaccattcttcctttcaacagcttatccgtagaattgaaattaggttggttaggtaccgtgggtagcatgatccctaatttcccgcttaaagatggaaaattgataagcctaacagaaacagcaaatagctctggtacgattgattatacgattactttagaagataatttacgtagtctagcagcaacgttagctcaagtcccgaacttccaaatatctcttgatatgacaaagttgatgacagaaagtactatcaaggctagcttattcggtaaacctctacaagcacctaacgcaaaattgccaatgggtgacgccgtcgtatatgcaaacttgaaatcgacaacaggcatgcctgctgattctattgtcttgacttcatatgatgccgcatctagcaaaatcaaaggatacaagaagttgactccgacaattggcgtatctggagcaaatctagttttaacgacaacagattcagtacgtgctgacgtaaatacagcttggactccaatgtctaaacagatcgttacaatgccagcaacaatgagcacagcgatcaattctattatgtcctctcttgttaatggtgtcgttagtaatcttaaagcaagcgcagaaaccaattacactattacaattgattctatttacgaagctaaaaaagatgaggttattcgtgtaatggaaatcgacgcaacgacaaaagttgaagctacgagcttaaaagatacaaagatgatcgtagatatcaacttcttgaaaggaagcaataaagagaatgtcatgaatatcaaggctacggctcctacaaatgatactaaaattacggtagactttagtcctgctgttgatcctaaaggcgatggcattaaagaaaatgtcaacatggcgacattatatattacatctgacgctatgggcatcatcaccgataacgagactatcagtgacgaggttcaagaagttacggtatctacaaccgctagcggtctttatgtaaagaatggtaagggtaattatgtaatcgttaatatggtaggtagagttgtttctacgggtatcatcactagcgatgagcaatacatcagtactccgaatatgccgaacggtatttatatgatctcaatcgatcagtctaagctcttgagatctgctcataagacaactgttaagttcgtaaaataaattatctagataattagttaatctgataaaaggagctatccggaaacaaaaccgagtagctcctttctttttgtcaatttgtaaaccaaactcccggagagttgatttttctggcctgatgtacttctcgtccctaaatatgagaaaaaatattagcaaatgattgtttagtaatatattagccaaatacgaccttttgttctagaaaaataattcatgctagttcacatttatacgggtcaaaacatattttttatacggataaaagaggcatttcatacggttgtatcgcccgacgcgactatatgtatcgccttatgcgacctatcgcgttggctaacgccactacttgcgtcgcccaacgcgaactttcgtgtgacaaaacatgaccttttacgtagaaatcagtggttaaatacgtattttcatccattatctatccctagttgaggcttcttgaaaaagaggctcgtcagacaaacagacttattttaagcaaatagatagatatatagtttttttacttacagttacagcaacccatattcacaaagcatatattacgatataaaaccaaaacacgcacttctaattatcatttataactaaaagcatatattataacttcaatctattacaaacctcatatttataaaacattcgagcctctcacctgttatatacttatcaaaacgttatatatttgcatcacaataaaacaaaaagaaataatataaagaataatatcatcaaaatgataaaatcaatcagattcacaaagatgcacggtgccggaaatgattacatctatgtaaacacgatggtctatccgatagacaaccccgaagaattatctatcgcatggagcaagccgcacataggcataggatctgatggtttggtcttgataggttcttcagacatcgcggatttcagcatgcatatctataatgcggacggctccgaggcgatgatgtgcggaaacgcatccagatgtattggcaaatatgtctatgaggccggcctaacgcaaaagaacaaggtcaccttagagaccttatcaggtatcaaagagctacaattgaaaatagagcgtgaagaggtcaccgaagtcacggtagatatgggaatgcctgccgtaggcgagatcgccttggaggttgaggctggaggagaaatttacaccggcaccgtcatctctatgggaaatcctcacttggttatcttcgtggacgagatggaccaggtcgatctggcaagcgtaggcccgttactggaatgcctcccgctttttccggaccggacaaacgtggagttcgtgcaggtgctaaagccggacgaggtacggatgagggtgtgggaacgaggttccggcatcacccaagcctgcggaaccggagcttgcgccaccgccgtggccggggtcgtacgtgggaagacaaagcgaaagacgaaggtcatcatggatgggggccctttaaccatcgagtgggacgagcgaagcggtaaggtctttatgaccggcggagcggtcaacgtgttcgagggattcatcaaagtctgacacggggaacaagacaaaacaacaaaaacaacaacataaaaacaaaagaactgagtatggcactaattaatgaacatttcctgaaactacagaacaattatcttttctccgacatcgcgaaaaaggtaaacagcttcaaggttacccatcccaaggataagatcattcgaatgggtattggtgacgttacgcaaccacttgcccccgccgttattgaggcgatgcataaagccgtggaagaaatggcgagcaaggatacattccacggatatggccccgagcagggatatcctttcctaatcgacgctatcatcaagaacgattatgccagccggggagtctttatcgaaccgagcgaggtattcatcagcgacggggcgaaaagcgattgtggaaatataggtgacatgctccgccacgacaatagtatcggggtgacagaccccgtatatccggtctacatcgactcgaacgtaatgagcggacgcaccggggtattggaaaacgggaaatggagcgatgtcgtatacatcccttgcacggaggaaaataacttcgtaccggatctgcccagtcgcagggtggacatcctttacctctgctatcccaataacccgaccggaacgaccttgactaaggacgaattgaagaaatgggtaaactatgccctcgccaacgacgtgcttatcatgtacgactccgcttacgaggcttatatacaggacccaaatattccccactctatctacgagatcaaaggagcgaagaaggtagccatcgaattccggagcttctctaaaaccgccggattcacgggaatacgttgcggatacacggttgtaccgaaagagctgaacgctttcacgctggacgggcaacgggtacagttgaacaaattatggaaccgtcgccaatgcacgaaattcaacggaaccagctacataacccaacggggtgcggaggcggtttattccaccgccgggaaacagcaagtaacagctactatcaattattatatgaccaacgcgaagatcatgaaagagggcctgcaaaattgcggtctcacggtgtacggaggcgataacgccccatacctctggctaaagaccccggacggcctctcctcatggaaattctttgacaaactgctttatgaagtcaagatagtcggaacccccggagtgggattcgggccgagcggggaaggttatctacgcctcaccgctttcggcgatagggatgacaccctagaggccatggctaggctgaggaagtggctaagataagtcatttactataaacaacaataatcatcaggtattatgtcaaagttaagatttagagtcgtagaatcggcgttcgagaagaaagcgaccgagctaaccactcccgccgagagaccttccgagtattacggtgagttagtattcaaccgtgagaagatgttcaaatatcttccagagagagcgtacgagagactggtggactccatcgacaacggtaccccgttagaccgtgagacagcgaacgccgtggcctccggcatgaagaaatgggcgatggaaaaaggcgctacccactacacccactggttccatcccttgacggaaggtaccgccgagaagcacgatgctttcatcgagcacgatggcaaaggcggcgtacttgaggaattcgaggggaaactactgatccagcaagagccggacgcctccagtttcccgaacggcggtatccgcaatacgttcgaggcccgtggctactcggcttgggatccttcctcccctgcttttatcgtaggagacaccctgtgcatcccgacgatcttcatcgcttacacaggcgagtccctcgactacaaagctcccttgctgaaagccttggaagccgtgaacaaggcggcggtcgatgtctgccactacttcaacccggacgtgaagaaagtatacgcctacctaggttgggaacaggaatacttcctagtagacgagggcctatacgccgcacgtcccgatctgttgatgaccggccgtactctgatggggcacgagagctcgaagaaccaacagttggaggatcattacttcggagccatccccacccgtgtcatggaattcatgaaagacctcgaggttgaggcattgaaacttggcattcccgtaaagacccgtcataacgaggtcgccccgaaccaattcgagctggctcccatcttcgaggaatgcaacctcgccaatgaccataacttactgatcatggccctaatgcgcaagatctcccgcaaacatgggttccgtgtcctgttgcacgagaaaccgttcaaaggcgtgaacggttccggcaagcacaataactggtcgctgggaaccgataccggaatccttttgatgggaccgggtaagacgccggaagacaacctgcgcttcgtgaccttcgtggtcaacgtactgaaagccgtgtacacccataacgcattgctgaaggccagcatctccagcgcgaccaacgcccatcgtctgggagcgaacgaggctcccccagcgatcatctccagcttcttagggacacagctatccaaggtattggaacatctggagaacagcgatacggaagatttcaacctagcgggaaagcaaggcatgaaactcgatatcgcccgtatccccgagttattgatcgataacacggatcgtaaccgtacctcccctttcgccttcaccggtaatcgtttcgagttccgtgccgtaggttcctccgcgaactgcgccgccgccatgctggtattgaacgccgccgtagcggatcagttgaggcagttcaaggccgaggtagacgctaagatagccaccggaaaggataagttcgccgctatcatcgaggtaatccgcaaggatatcaaggaatgcaaggcgatccatttcgacggcaatggctacagcgaggaatggaaggccgaggccgcacgccggggcttggattgcgagaccagcgtgcctttgatcttcgacgcttatttgaaagatagcagcgtccgcatgttcgagtccacgggagtcatgacccgcaaggagctggaggctcgcaacgaggtcaaatgggagatgtacacgaagaagatccagatcgaggcccgtgtattaggcgacctgacaatgaaccatatcatcccgatggccaccaaataccagtcttccttgatcgacaacgtatataagatgcgtgaattattccccgccgataaagccgcccatctatcctccaagaacatggagatcatcgaggatatagcgaaccgcacgatcttcatcaaggaaaaagtggacgagatggtcaacgcccgcaagatagccaacaagatcgagagcgagcgggagaaggcgatcgcttaccacgaccggatcgtcccgatgatggaagccatccgttaccatatcgacaagttggaactggttgtcgacgaccagatatggaccttgccgaaataccgtgagcttttattcatcagatagtcttattcagacagtagttttttgttgattgttttgtgttaataaggagaggatgctgcgaagtatacctctccttcttttttatcccatacaaaatacatacctttggggcataaatatataggagggaaattgatatgacgacaatagagttacagcaatggagagaaagcttcgtggagagataccttaacaagatcgatgacatggagatatcggaggaactggaacgggctgccaaaaagatcttttccaagagaaggacaccccgcccttgcgtaatccactcgcaagaggagatgatagcagaggtacggaaatcggtagaagacgcccgagaaggtagagtcacatcaagtgaggatctagataaagagatagagacatggttctgaaacagaaaaatccatattggacagccaaggccaaagaagatttgaaagaaattacgaagtattataagaaggagatttctatcaacatggcccacaagaaagtcaaggacctgaaacattacgccgatttgttagctgacaatcctcttctcggtttttatgagcaagctttatcctcggagccgcaaggctttcggtctcttgttcatgaacattacaaaatcatctattttatagaagatgatatcatctatatctccgcgatcttcgactgtcgtcaaaaccccgataaattaagaacatctatcagataaacaataacaaatatgaattacggattcgtcaaagtagcggcagccgtaccacatgttaaagtggctgactgcttttataatattcaacagatcgagggattgatgcgccaagcgtcccaaaaagaggtccagatcatcgctttccccgaattatcggttacgtcttacacttgcatggacttgttctcgcaagagaccttactcagaaacgccgagaaagccttgctggatttagtgaacaacaccgccgatctggatttactaacgatcgtaggttgcccgcttgtcagcggaagccaactgataaacgccgccgtcgctttccaacggggcgagatactaggggtagtgcccaagagctacctgcccagctacaaggagttccaagaagagcgttggttcacggcctcttcacacctacagcaatccatgatcacgatcggtaaccgggaagtgccgttggattgctacctgatcttcgagtatgatgaggtacgcgtgggtatcgagatctgcgaggatctttgggttcccatccctcccagctccgagctagccatgcagggggcgaacttgatattcaatctatccgccagcaacgagttgatcggtaagcatgcttacttacgatccttgatctgccagcaatccgcacgttgtatcgccggatacgtctacgcatccgccggtttcggggaatccagtaccgacctcgtattcgcgggaaacggtatcatagcggagaacggcacgttgttaagggaatccgagcgtttctccatggaggagcaactcgttatcagcgagatcgatatccagaacttacagaacgaccgacggatcaacaccagtttcatgcagggttatctcaaccataacatggataacggcaccgtagtctcattcagccttcccagccgggcgctggacttgacccgggtaatcgacccgcatccctttaccccttccggcgatgccttgaaagaacgttgcgaggaaatattccatatacaggtagcgggactcgccaagcgtgtcctccatgcccacgcccaaaccgccgtcgtaggcatctctgggggactggattccaccttggccctactggtcaccgtcatgaccttcgatgccttgaagatcccacgggataagatcatcggcatcaccatgcccggcttcgggacgacggatcgtacctataccaatgcctgcgacttgatacgctccctgggcgtgaccctccgggagatctccatcaaggaggcttgcgtccaacatttcaaggatattgatcacgacatccatgtacatgacgtgacctacgagaacagccaagcccgcgagcgtacccaacttcttatggacgtggcgaaccaagcgaacggcctcgtgatcggtacgggggatctctcggagcttgccttgggctgggctacttacaatggcgaccatatgtctatgtacggcgtcaacggtagcattcccaagacattggtcaaatatctggtggaatgggttgccaacaacaaggtagacgaggcttcccgcaccacgttattagatatagtagacactccgatcagcccggaattgattcccgccgacgagcatggaaatatcaagcagaagacggaggatttggtaggcccctacgagctgcacgatttcttcctctatcacttcctgcgcttcggtgcctcccccgcgaagatctacttcttggcgaagcgggcattcggggaaacctacgacgatgccaccctcaagaaatggctccatacctttttccgccgcttcttccagcaacagttcaagcgcagttgcctgcccgacggcccgaaagtaggctccatcagcctctccccgcgtggagactggcgaatgccgagcgacgcgatggctacgctttggctggatgagatcgcagggctttaacattcgttcacgggtatggtcatagacgaggctctctcatgggtgtcgaagcctcggctatgacccgtgagagagcctcagttatgatcggtgagaaagcctcggctatgatcctgcctaatcgaactgcgtgatcaccctccggatccgggtgaagctatcgccgtccttctccagtttatagatgtgcttataggacagggcatcctgctcggtcggtgagccattgatcaagagaatatcccggtcgttggcgaatttcaagatccccgccacgttattcgggtgtagcttcccgatctcatccatcatgcaatgtagcctgaaatcggagaacaccgtggaggcgttccgcttgaacacgttcagcaacatgatatttaccatggatttgaccagaatatccgtaccctcggagcctacgttcgtaaggcgctccacgaagcccgtatcattccggttctcgatcacccggaatttaaggtcgaagaaatccgctagacggatcaagttgccggaataagcgtccatcgacttgatcaactcacgtagcaacgtcgtcgccttctcccgggtagccgtatcgtcggccgaggaagcgaacaggttctgccccaaatcccagctatattcctcgttgaatcgcttgatctccttcaacagattgacgatcttgttctggctcggatcgatacgcatctcgatacactggataatccctacgaagttcttctccttgaaatcggcgttgatctgatccaccacgccacggatattgccttcctgagagaccatgcttttcgtgtccgacgtgatctgccggaagatatccgagttgcgggtattgatacgcgactggtattccgagaccttatcctcgtcgataaactccttcaagtcgcaagcgaaatccatatactctttatcatccgagaagctcgtcttgaaggcgaacacattatcctcggagaaattgccggtgtaggcggttatctccttgcgcagctcggaaagcttctgggattgctcgctgacgcggatcgtgatctcccgtaccaaggaacggcaatcgccatccgtatcggtacggttcatggaagagaagatggattccctagaggtaaaccagtccaacagggtagagcggtgatattcctcccggttctccaacgctttccggttggcctccttcagctccttcagctcggcatctatcttgaagatattccggttcacgtccgccagacgctttttcaattcctcctgttccccgtggatgatctgctgcaaacgtaggctctccgccgtccagtcgggtaccttatccagcatctctcgcttatctttcagatactcgataatcaaagccttggtctcgttgatatacttgatctccccaccgatatacgccaagcgggaatggatctcctccaaacgcctcggatcgccaccgctagcggtcaagctatccaattgctccctgtcatatccggatttgcgctcttccagctccgctttcttgcgtgcgatctcctccgagatagcttccctccgggcggagagttccttatccaaagcagccaactcatctttctcttgctcatccaaggaagcgagttcccggtccatcttgccctgaagcgtggcgatctcctgccggatcgaggaaaggacggcctcggcagcgttcaactcctcctccaagcgccggatctcctcctgcctcagacgggtcgcctgatcccgcaaggccgacagacgagactcgtcctctttcttgcggaccgccagttgctccaactcatattccgcatgatagatatcctccttgatgggcttcacggaggattgatattgcttgcggagattctcctttgccgcctccaaatcctgccgcgccgtagcgatgaagcgctggattccggcacgtttttcctcggcctccttcttctccgtcaagtaatcctccttggtcttgacattccggtgaatcccggaggtgaagcggattccataaaaggtatctccctcgcctacctccgccgtaaactctttcccgtaaagcaggcgctcgtcacacacttgcccgatcgtctgctcccagccgggtttatgctcggacagccagttgaagaagctatctttctggttatccaagaattccgtcagttccgctagcttagcgctcagggcctcgatcttcacctcgttggattccgctagcttttgataatcctcatccaaatgcttctcggcggtctcgaactctttcatctggtagttcaactcgtacttcagctcacggatcttcagctccaagtccttccggttcgcatcgtaattgccgagacgccccttgaccgcctccaattcctccgaggttcccgactgcccccgggcagtcttgatacgcatcttcaaggcggcgacctccgtcgtacgtttctcccgatccaccaacaaacgctctttctcctccgaggcggcatggcgcgattcctcccgtagccgtcgataatactcccggcgagcctcccgacgagcattgatctcagtctctgccgccagtaattgtttctgtttctcgttctcgaagccggccaactcgttcttcagattagcgatcaaattggcgtgcaagaccgaggcttccttattcttggaagaaagcaaatctttctccacgactaaggattcctgttcctgctgcaagatctccaatttgttacaacgatccatcgccgtctggatatcttttccggcatagaaaacccgtttcgcttccgcctccgacaaggcgtttttcagcacggccaactcgccttccatcgtggctgtccggttcttcgattcagcgtctagcttatccctttgcttatagaaatccgatttgaccgcctcctgctcgtgtatcttccgggacaactccggcaagatacgctccgtttccagataagccccgcgcaattggcgacacagatcgttgatccgtaaatcccgcttacggatatcgtccgataaggcagagatcccggcggccttccgcgccatgcccggttcacggaaaacaccgatatcattcagttgcgcctcaaaaccggatagatggctccggtaacggctcaagtcgatcacgctatccgcctcgttcaaggaggtgatgatcgtctgcttgatataatccgcctccaagcgtgaattcagcaagacgttctggatcgtacggatgatattctggtaggagccgctctccatcaaggaataacaagagtaatcccgtttattatccgagtttccgtagaggatattccggtattcctcatacgtggagatcgccccgctatacttgataccgttcttatcgagcaccgagcggatacgatccgacggataaggcgctccctcctcgtcgataaaaagatccggccggtacggagaggcgataaagcggtagcagatacggttcatcgtcttatagctaagtaccgtaaaccaaccatcctccctcgctacctcgtagatgatcgaggaatcggcataagggaaataataatcctgatacgatttcttctcgaccgggattccgagccgctgcgtatcggcgttgtaaaagaaaaggatcgcacggaggatcgtactcttccccactccctgcgttccgattaaatgtatatttccatccagctgcacttccgagtaacggatagcggcgctgtttataaatactattttattgagatatctcatcttcgttctttatgttaatactatggatcatctttgtgaggtaatcccacgaggagagcactttccacgtcccgttcatatcgcttacgcactcgataaagccctctttcgtcatcctgtccaaaatggtatcgaggatatccttgcgtttctccttgcctccggtatgttttttcaacccgtccagcttcatctctagatccatgtcgatacgggaacgtaccaatatctccgccggcgagaaagtgaaaccgggcccgaaggccgtatcgtacgtacagaagaagtccatgatatcgatccaagcgaagaaacgctggagcttttgctccaaggtagcccggggctccttgcgggagaagtagaagtaattattcccctgctccaacacgaaattgatatgcgagaaataatcacgtaaacgctcaaaattatcttctacgaccgagaagagtgtcctcaactcctttacacttgtattcgagcacagaaaattacctttcgacaggtaatcatagatctgtgcggtctgtaccggtaaattatctatcatcttattattattgttttattttatccagctgtagagacggggcgtgccccgtctctacagctaggttctttgaataatggcatattctacatgctccatatgcccaaaacggtctgttatctccaactcattctcatagagggagagtaaacggcaaaataacgtaaccttcgcctcgaaatccatcttccggttataatcatacgccatcacgaaagagaacaaatcccctccggtccggctaaaaacatccatcatcttccgggtattgatagcagcctcccccacctcttgattctccatctgctcggcggagatcacccccagctcctgccggtggatcaccttgtccggccgtatgccgtcggccaccttcaagatgacatccagtgcctcgtccgtttgcaaataaggaatggaaaccttgaataaggtaggctgcacgccctccaataccacggaacgctccgcgtctaccacctcccgcacgttcgtgttctcctgtaactcaaactgctcccgcagatatttgatacgacgcagcttacgggtaaaacccacctgcgtacggatctggttcaagtaatcaatgatatcctgttgggaatgaatcaagctatggccggcgctcaataactccgtcttcaactcacgggcgatcgtcaacaactcctcgtccggggcttgggcgaaaaagggagtccgttcccgatccagcagcttctccacttccacgatcaggcggttgatctcgattcgtttagcgtccagattctccagtttggcgatcttcaccttatagctcggctcgttcttgaacgtattatcgatcacccgttgcaaggacaccacgttacgtaccaagatcttcccgatcttccgcaaatgcgccttgaccgatcgcagatagcccaacttacgcaaatcgttatcctccttgctataataatcgatcaattgatacaccaactggatattctcatcgatcaccgaggtagaaatctcctcattcgcctccagaagcagctcatagaaagagagataatgctcatccatctcgatataagggccgttcctgcggatcacctcacgctcgatcaggatattcaatttattctcatcgataatatccaacgcataatcatagcgaaacggtaatgattttcttttctcaaataagacctccaataggtcctttcccagatttagcgtgttcgttatatggggtattgaattatatatgtacatcctaaacaattaaggacacaaaggtaataaaaatacaagtaacccttttttctccgtgatggaaaaagaggaaaatcacgaagagttatcaatccgccggatacacaattcccaactgccggcgtacttcatcgataatctccaatgtaatcaaagaattatcaaggctattgatttctgactcccgcttgccagacaagacgaggttgataaattccgctacctcataatagtactcatccttatcggcgaccacgcttaggtcttccggaaccggttccgggccttttcccatcgccggagctaaacggggagaatacgtcactttacggatgatattgatccggtccaaggtcaagttcccctcctccccttgtatctcggtaggcaaggcggagttggcgatcttagaataaagcaccgtggcgttcatcccctcatacaagaaattcacggccccttgcccgtccgctcctgaggacaggactatgcccgaggcatctatcttctttgggcgaccaaacaagacaaccatcggatagaccgtataaataccgatatccatcatggccccattagacaactccggcttgaaagcgttcaacacgattccttccttgaacttatcataacgggaggaatactggcaatagcaggcgaaataacgacgaaccgtacctacacgcccaagattctctcgcacggcaagaaagttcggcgtaagcgtaggcttcatcgcctccatcaacgtgacattatatgtacgggaagcctcgatcatcgcacgtacttctttcgcattggaagcgaagggtttctcgcaaagaacatgcttgccatagctcatgcaaagaatactctgggaggcatgaaggaagttcggggaggcaatatacacagcgtcgatcaacgggcttttcgccatctcctccaaggaggtaaacgtatacggtatattatgtttcgaggcgaaagcatccgccgtctcctgagttctcgaatatacagctaccagttcaaaacgctcatcctgccgggctccggcaattacccaatcacttatgaaattggttccgactacaccaaaacgtactttatccatattctatcgtattatgttctttatttacaaatgtacgatttctgtttaacataaatactccgtggaaatgttattgtatctataaaatggataagccgcaggaactttttcgcaacgacgctgtttaatctatacaatttaaaaccgttttaaaactaaatcaagtatgaaaagaattgtatcttttatcgtcgttctcgctgtcgctatgtgcggaatgacacaagtaatggctcaaaaatcgataacaaaggaagccaaaaaagtagagagagaaatcaaaaaacaagagcgtctggcacaagatgccgtagaaggccaagaagagtttaacgccgctgtacaagctatcaacaaccaatcattcgtattggaggctaacaacatacaaccgatgaacggacaggtattctacgtaaattcaaatacgaacttcgtatctttgaatgacggacaggctatggtccagatcgcatccaactctccgtatcccggtcctaacggattaggtggtatcaccgtacaaggtagcgcctccaatatccagaccaagcaggatgacaagggcaatgtttatctgaacatgaacgtacagggtgtgtttatctccgctaccgttagcttgatgcttaccaacggaacaaacaacgcaaccgttaccgtagacccgaacttctccggtagaaacttgagaatgaccggtaccctacttccgtactcacaatcgaacattttccagggaacaacatattaatcatgtccaacttttctataataaggaaggcggtgctccgtgaggaacatcgccttcgaactatttatagatagccttatctcttatttacggaaaggagcctttaccacttgagccttcaagttcttattacgcaccttgataaagatatccgtacccgctttcgcaaactcaggtttcacgtatcccataccgatccccttcttcaataccggagacatcgtaccggaagtaaccacgccaattacattcccttccgcatcggcgatctcatagccatgacggggaattcccttttcctgcaactcgaaagcacacaacttacgggttacgccctctttcttctgacgctccaattccgcacgattcgtaaagttcttaccctcggcgaacttcgtgatccagcctaaaccagcctcgatcggagaagtcgtatcatccaaatcatttccatacaagcagaagcccatctcaagacgaagcgtatcgcgtgctcccaaaccgatcggcttgatcccttccggctttccagcctcgaagatagcgttccagatcgtcatcgcatcactcggatagaaatacaactcgaagccacccgcaccggtataccccgtgttggagataatcacgttcttgcaaccggcgaactcacccgtcacaaatgaatagtaaggaatagaagataagtcaaccggagtaagacgttgaagaacctcttgtgccttcgggccttggatagccaattgagccgtacggtcagaagaattctccaactcggcacctaccgtattatggcttacgcaccaatcccaatccttgtcaatattaccggcatttacgaccagcaaatatttctccggctcgtaatgatataccaaaaggtcatccacgatacctcccttgtcattcgggaagcaagtatattgagccttgccaagcggcaagacagaagcgtcattagaagttacgctttgaatgaaagccaaggcgttcgggccttttacccaaaactcgcccatgtgggaaacatcaaacacacctacaccattcactacagtcatgtgttcgtcgataattccggaatattcgataggcatattgaaacctgcgaattcgtgcatcttcgcgcccaaggcgatatgcacgtcggtaaacggagttgttttcatgtaattattgcatttaagatttacgagccgatagctctatgatttttataactgtttccatactcttctccaacgaacgaacgggcaagaactcataacgtccgtggaaattcaggcctcccgcaaaaatattcgggcaaggcaatcccataaacgacaggcgggcaccatccgtacctccccggatcggtttcacgatcggttctaccccaacggaggtcatcgcctcaaacgccaaatcaacgatatgcttctggggctccacgacctcgcgcatattgtaatattgatcccgaagctctaaatgcgcacatcccggatgcgcttcattcatcttatcaaccaacgtacgaagcaattctttcttctcctcgaacaacttccggtcatggtcacggatgatgtaagatagagtagcctcctcgactgaaccggtcataccggtcaaatggaagaatccctcataaccagtcgtatgctccggacgttgctcggccggcaaccaagaagcaaactcgatcgcacgcaaggaagcgttttgcatcttatccttggcgtatcccggatgtacgttcaagcccttgaagataattttagcgccggcggcattgaaattctcatattccaactcaccgatttgtccaccatcaatcgtatatccccaatcacaaccgaacttctccacgtcgaaatgatcggcaccttgtccgatttcctcatccggggtaaaagcgatacggatcttaccgtgcttgatctccggatgatccttcaaatattgcatagaggcgacgatagcggctacacctcccttatcatcggcacctaataaagtcttaccattcgttacgataatatcctgtcccttataatcagaaagctctgggaacatcgattgagatagtacaacattttcttccgcatccaagacaatatcaccacccagataagtcacgatacgaggttgaacattcttacccgacatatccggactcgtatccaaatgagcgataaaaccgatagtcgggattttctcgtccgtattagccggcagagtagccattacataactattctcatccaaggagatctcctccataccaatcgcttccaattccttcaccaaagcctcggcaaagacacgttgtcccggcgtactaggagtcgtacccgtctcctcgttcgactgggtatcgaacgtaacgtactttaaaaatctatctaaaactgtcataactcactcttttaaaacagccataaaagtagacaaagcaagttacatgacaaaaaaatagcgagacaaattgtcccgctattcctgtttctctcaaaaaatgtcatcaaaagcagcttgaaccgtcgaagcagtgcgtacaaaccttacacttaggcaagccgatcgcctccaccaaggtttccagcgtattaaacttcaaggaactcaacccgaaacgctcggcgataattccgaccatcttcttatattccggagagtctgtcgtagcatatttatccagattcttattctcatccccttccagttccttgataatctgacgagttatcaactccaaaggactcttggaagaagtaaaaccgataaacgggcaactataaatcaatggagggcaagcgatacgcatatgtacctctttcgccccataatcatataagatcttcacgttatcacgaagctgtgtaccacgcacgatcgagtcgtcgcagaaaaggatgcgtctgccttccagcatcgcacggttcggtatcaatttcatcttagccaccaaagcacgcatctcttggttagccggggtaaaactacgaggccacgtcggtgtatacttagcgatagcccgatgataaggcacccccttaccttccgcatatcccaaggccatacccacgccggagtccggtataccacaggcgcaatccacctccgagtcatccttctgccccatcttatatccactcataaaccggacatcctccacgttcttaccctcatagcaagaaaccggaaatccataatacacccaaaggaaagagcagacctgcatcccttcattcggtttacgcatctgctccataccatcggcacgcaaacggacgatctcgcccgggcctataaatttctcgatctcataatccaagttcggaagactgctagactcactggtcgccgcataagctccgtctttcttcccgattacgatcggcgtacgcccccacttatcacgggcggcgataataccatcctccgtcaggagcaacatagagcaagagccctttatcttattgtaaacattctcaataccctccacgaagtccttgccttgtgtaatcagcaaagcgactaactccgtctgattcgtttttccggaactcaattccgagaaatgcatgttcgcttccaataactccttttccagctcgtccagattattaatcttcgccaccgtcacgatcgcgaatttacctaagtgagagttgataacgataggctgcgcatccgtatcgctgataataccgatcccggcttttcctttgaatttaggaagccccggttcaaacttggtgcggaaataagaattctccagattgtggatcgaacgcgtaaacccttcttccttatcgtacgtagccataccgcctctgcgggttcctagatgagaattgtagtctgtaccatagaataaatccgtaatacaggctcctttagaaatagttccgaaaaaaccacccattgttttttatgtttgtatttatgtttgagaccgcaaagttacaagtttatttatatatgttccaaaatttacttcataacgtttattatcatcggcaataaaaaaaggataccccttttcaggatatccttttccttattctttggtcgcagaaacttaagcctcagcaacaacttcttttacagaaacaaatgatctgttttcttttcctctacggaaagtaacaacgccatctaccaacgcatacaacgtatgatccttaccgatacctacgttctcgcccggatgatgaaccgtacctctttgacgaacgatgatgttaccagctttagcaacctcaccaccaaaaagcttaacacctaatcttttactttgtgattcacggccgttcttagaactacccacaccttttttatgtgccatttcttttcttctcctttaaacgttaagcaataacttctttaatactcacctcagtgaactgctgacggtgaccgttcaatttacggtaaccttttcttctcttcttgtggaataccagcaccttgtcaccttttaccagcggagataatacctcgcatactacctttgcgccctctacagtaggaacacccactgttacctcaccgttgttatctactaacaacaccttgtcaaactccacaacagcaccgctttccgcgttctgaatgtgatgaacgaacaatttcttgccttgctcagccttgaactgttgtccgttaatttctacgattacgtacatctgtcttaaaatcttttaaacaggttaggtcccgggggtgggctccgtctccggctccacttatttaccctctgcggaaaatcgagtgcaaagatagagttttttatttaattccacaaacatcttcttgaacttttaaaaagccacgcataagacgatgagaatacagagctttttactacctttgcaactaataatatattactattatccaaataaagatgcaggaaacaaataatatgttatcagttcttgacaactatacgctagacaacccggatgagatcgctaaagaaatagccaacgacttccgcaagcgacgtatagagaagaatctgacacgcgaacaagtgtcggagaaggcaggtgtagcagtcagtaatatcgtgcgattcgaacagaaaggtcttatctcactcaagaaccttatcggcatagcaatggcattaggttacacttcggagataaagaagcttttttccgaaccaaaatactccaccatggaggagctactacaaatccgcaagaataccaacaagaaaaaagtacataagtaatgagaatcaaaaaaatagaaagacttatcgtaaagtatcacgaacagatagtcgggacgctttcgctcactcccgacaacaaacagtgtgcctttgaatacgataaagcatggctttccaacggtttcagtatatccccattggaacttccgctgaaaccgggattgttcatcgcaaagccctcacctttttatgggaatttcggtgttttcgaagacagtctgcccgatggctatggtcgctacctcttgcataaggccttgctcaaagaaggcatcaacgatacccaattgtcagcgctcgaccgtctaagtctagtgggaaatgggggtatgggagcactcacatacgaaccggaaaccagcataggtacttcgcatgagccccttgatttcgatctgctgcaagaaaaggccttagaagtgttgcatgagaagaacgacgatgacgtagaacttcttctttttaacagccgaaatagcggcggatgcagacccaaggcattgttctccaacaatgaagggcattggatggtgaagttccgccatacatacgaccctcaagacatgggattgatagaatttcattacaatgagttagcacgacaatgtggcatccgcgttccagacttcaaactgatcaacggtaagtatttcacgacacgccgcttcgacatctcgcaagatggagaacgtttgcatacagtcacagccggaggactgcttaacattccactatccaacccaattctcgattatagcaacttactggccctaactggctatctaacgcagaatcctttagaagtggaagaaatgtttcgtcgtatggttttcaactatttcacagacaacaaagatgatcattgcaagaatttcagtttcacaatacagaaaagtgataccagcacatggcaatggcatcttgctcccgcctacgatctcaccctatgcacagagggttataatggtgaacatgcgacttcggtcaatggaaccggacatcccaccattcaagacatgataaccatcggtactaaaaacaagatgaataaaccgcgctgcatacgaatcattgaagaggttaggactggctgcggagatttgttgcggaacaaagactgggagtaatttcgacaataggagctgccttccaatctatcagaccatccgccgtacgtaagtccataaaatcaaaatccataagccatcgtttcaatttctcttccgctccacgcaagccataatacgatttgaaacgacggatataatttaagtcctcaatcatcggttgctccgcatccagatcacgaggatggatgtaagccaacaaatattccggacattcacgtgtccatttcctcaataatctatagggaaccaagcggaaatagcctcctccagagaaaacgatatgctttcccaatatcttacgatacacgatcgggaattctttcatccttattccgttatattccacccagctaggcaccgcagaaacatatgatggcattcctccatgcgcatgatgcgcaggaaaaaccgagctatccatacgaattcccaattcatgcaatatctcgaaagcccacccctcgctctcacggatcgagaagcccggcgcacgaaaagcctctaccttctgtcccgttatatcctccagcaattttatggaagaagagacatcctctttgaatgcctccctcgattgttgccacactaactgatgattcatcgtatggcttcccacctgatacttggatgcaatctgtctcacgatatccggatacgtcttggcgatccagccgatcacgaaaaaagtagccttcgtatctgtctcctccaagatacgaaaaatgcgctccatattctcatagatacgcacttcaaaccctttccactgctcctcggagcgtgtagagtcgttatcgaggagatgaaaccattcctcgatgtcgaaagttagtatgttcataggaatttaaaaacttacaacaaatcgtaattagacaggtttacctcccaattccggatatcataaagtgaatcatcaaaaaaatctttcactaaaggcttacatgtaaaattgaaatgtttaggttccaaacgatgagggacagaaaacaagcctataggagtaaaaggcaaatttcccacgtaaataatcatgtctatccccttccgctctttcttatagatatatcggacagcctcttcaaatgcagatctcgaaagcggccacacttctaacaagaaagctgtctcaacttcattataccgttctaacttataaacaaattgagatcctttacgtgacacttttcgataatcacctccaaaccagcgataacgcaccttgtcaaaagactcacgttccttatgatacttgaatgaatatggccgatgaccgatcgacaagaaagagcatgcgtattgcgctcttgaaaagatccggctaaaaatattcaagaaagcaagcctcctttttaccgccccgatattacggatcatacaataggtggtcagttttcccacatcccgatgcttcaaccccttttttagtatcggataagagttatcattcgggaaaccgattctcagtacacaaccgtcttcttttaaccgtttctggcattggacgatcatatcgtgaaaactgaaataatcacgatacgcctttttcaccatcgagtcgataccaagcgcaaccataaaacgctcattgcctctttggtaatagaaaggcatgcaggaatggaaacctaccgtatctccctcctcattcaataatatactatggtaagaatatcccaaaggtgtatttgaatagttctcacgaaacgtagccacatcacgcttctgcccgaacacctcctcgaaaagagcataaatcgctacgatctcctcatccgagagttcgaaagttttctttactaatacttccatgatctcatcttattgagccgtatatcccccatctacaacaatattctgcccggtgatccagcgagaagcgtccgaaagaaggaatagacaagttcgggagatatcggttacttcacctaaacctaaagggaatccacttacacgttgtttataatcttcctcggaaagggaagaaagaaaacgttccatcagtggcgttcttattgtgcctggcgatatgctatttatacaaatctttttgggggcaaattccaatgccattgacttaaccgcactaaccatagctccttttgatgcggcataggcagagacccctccccttcccacgatagacagaatagatgagatcaagacaatccgtcctccatcattaaaattctttcgactactgaaataacgtataaactcaaaagcacttaacgtattaacggtaaatacactcttataatcatccgaagataaaagtttcaatggcaaagtcttttctattccggctgcatgaacataagcatctatcttaccgtgcgcagaaacaatattatccaccaatggcctaatttggtctatctgaaatagatccaccaaataacaactatgcctctccgggtactccatcatagataccgtctccttcagccgctcttcatcccgggcgatcaataccaccgaagcccccatcttactacaatctatcgcacattgccgaccaataccggaagacgctccggtcacaacgatcaactttccttccaaagagaatggattcatcatatctccactatatcacttattttacaatccacaaacggcacgatacccgtagcccacgtcatccccacaccgaaagcacttaacagcaacttcttcttgccataaagtttatctttcaattcactaacaatagttaatggcagtgagacagacgaggtattaccatatttagcgattgtggacggaatcttatccggatccagtttcatcttcttagctatataagcgttgataaaattattcgcttgatgaaacacgatataatcaaatgagtccgcagtatcacccgcatattccaatgtcttttttatatcacgaggaatttcccggatcacgaagttaaaaacatccccgccttgcatatacccctgctcatcgctacgaatattgccatactcatccacgactttctctcgcaatgtctcctcagaactgggatgtcgatatcctccaccttttatcatgataagatctgcccgagagccatccgagttcaatgagaaataacttttcccaaacttctcatctcgctccaccaaggcagccaccccaccgtctccaaacaggaacgcactccgacgatccttgggcgagtaaacctttgaacgagtctctccatccaatatcaaggcttttcgaatccccccagattgcatcatgccatataccacggaaaggccataacaaaacgccgaacatcctaaagaaatatcaaaagccacacatgaatgagatagtttcagtcgatcttgaagaatgacagaagtagcaggcatccgataatccggagtctgggagataaataccaacaaatcaatttcctctttatttatcccattatcctctatcaatctctccgccgcagcaaaacacaaatccgaagaacatgtatcggcatcagcgaaacgacgttcatagatccctatcttatcaacaacctcctttacttgatcttccgggaagtattgagtatatttataattatcaaccacacaccgaggaaccgcagcggccattgccgttatacctactccctcgtaagtcaaaaatgccatctctcaatctattttacagccaaatcatacaaatctccaagtgtaacacacgctttcagctccttaccgccaacctctttttcaaactcctcatcgaacaaagcgataagagacaacaccgccaaagagctccactcatccaaatcgcgaaattccgtattctctgacaattttttcgtatcttctacttctatcgcttcagcgaacttctctataaaaacttgaatatccataatcttacttatataatttaaattttacgattccatttataccccaacaaaaaagacaataagctgccttaaataaagagacatgctccaccgtccttagcaccttccattgcgagaagatagtcttcctcttattagccgtcaccgccctttggcgcactctatacagaattgagactcccggattataatgcgcataaggtacatctttcaacatttcaagccaatatacatagtcatcacgcatgctgcccaatgcctcattgaaataatatttttcacactttgacaaatcatataccgtggccgatggacatatcggacataccttcaacagatccttataatcaaccctatcaggacggggaaaaggagagctgattttttcttttgtattctcatctatcctttgtacaccgccataagcgatcacgacatccttattgctcaaaaacaaaatttgggactccaaatactcttccggccacatatcatccgaatcaaggaacgctatgtactgtccttgcgcctctttcaacgcgatatttctcgctcccgaagatcccttatttatcttactttctatcaacttaatccggggatccgcatatcgcttcacgacgttgatccccgacccatcatcgggagaacaatcatccacgataatcatctcccagttcgtatatgtttgcttcaagacagattctatcgtgtctccaacaaattcagcccctttatacataggggtaatgatcgagaccaatcccttttccatatttatttgatttttatattataatcacactccgatcaaaagaccaacgaaccttgtcagccgattcttgtttctcacccttgcgtatagaaacccgataaccattggcaagccaaagcccatcacgatcgataccaacgacaacacatattgattcacttccggcaaggcatgggcgataggtccccgaatgaacatttgcggaaaataagacaacaagaacacggtataggtaaatcccgacaaccttatcattcgatctccacaatgcttctccaccgcgagcgacaaggtcagactaaaagcaatgccgaccaaagcggccattacttttaccggaatcaagcctgccgataggacgaatgagcccaaaagcatagcacccctatagcgcgacagaatcgcatccacccttcccttgtagatacaataaagaatccccaagccgaaataaaccgaataatgaaccgcggacgatatttgcataaatgacagatcgggtatcacacggcttaacacaaatagcagaattaccccccccatttgtaaatatatgttaacgcatatccatttccttaaaagcgagaagaacacgaatatcatgaacaacgccggtaaaaaccacataaagccaatcggatgaaaaagcaaactctccacccacgaggagaaactaaacgtcaacggatgctgcatcaaatcggcagaaacaaaacgtgactttatgacgaaaatcacactattaatgaataagaatggcaataaaagccgcttgacctttttccatataaacgggaaaaatctcattcccttcatcttattctcagggtgtgtatatgcgaacaagaagccggacaccaaaaagaatagaggcatatgaaatgaatacacccatttatgaatccagagatctttgtaatccaaggttatatccgcatggcctatcacgaccaacaatgtcgcgaagacaaataaaaatgatacttgcgtgagtttattacccataatcattccatgtttagcacaatttctccgccaattccaacgcgctagcgatcacctgatgcatatcataatatttatattccgccagccggcccccaaagatcactttctcctgcccatcggccaacgccttgtatcgagcatacagatcgctgttccgtatatcgtttaccggataataaggctcatcccccggtctccactccttggaatactctcgtgagatcaccgtgtccggttgctgtccgaactcaaaatgtttatgttcgataatacgggtataaggagtatcggcatccgtatagttcaccacggcatttccttggaaattaggaactccttccaataactctgtttcgaaactcacggttcgatactccaagtgtccaaagcgataatcaaagaaacgatcaatctcccccgtgtagattacccggtccgctatcgaatcaaaatattctcgattttcgaaataatctgtatcaagacgtacttccacgccctctaacatccgctcgatcatcctcgtgtatccgccctccgggataccttgatatttatcgttgaaataattattatcgaaagtgaaacgcacaggaagtcgtttgatgataaacgcaggaagttccgtagatttacgcccccattgcttctcggtataatccttgattaacgtataataaatatccttccctatcaaagaaatcgcctgttcttctaaattctgcgggttaatgattccagattctttccgttgcttctctatcatctccttggccttctccggggtagtcactccccacatctgatagaaagtattcatattgaagggtaaattatacagttttcccttatattttgccactggagagttggtgtaccgattgaactccacaaaagagttcacgaactcccataccctcctgtcactggtatgaaagatatgcgccccgtacttatgcacgttgatgccattcacggactccgtatagacattaccgccaatgtgaggacgtttgtctataaccaaacatttatatcctttttgatgaaggaggtaggccattgtggttccaaagagaccagaaccgacgataaggtagttgtattgattcattatttaatgcatcctataattaaaaaagttcaaaactttcattgttacaaaaaggagaaacggagatttggagatagaatacatgattctatgttttcgcggtaaaaaaacagcaaaatcgccatattccaaataacaggtagaactcatgcaaaaattatacatcttacaatattgcggatattgaagccgttgagctatttgaagcaaattatacaaatttgattttagatatctcgctttatacaacttgtccaaaggctcattatagcaattatgctcctccataaaagatctagcagacaacaaggcaatattcatatcttggaataatttttcaaaagaagaacgcgatatactcccctccctctcccggatatcgaataagaccttatcaacaaacgaaattttctttgccaaacaagctatttgaatagagaagagagtgtcctcattcacaattccctccttaaataacaggccattctcatgtaaaaaatcacggcggtacaatttaccccaagccgaagtaggaaaagttttcactaataaggcattcggtagtatctcatccccggttatgtagttaacaccaaaagagctacgtcctcgtcttattgtacccatcgcggaaatatattgtgccaaacaacaactcacatcagaattattccgctgaatatcttggtatagctcttgaatgcaattcttctcaatccaatcgtcactgtctacaaataagacatagtctcctttagcaacctttagcccagcatttctcgcggcagacaatcctccatttctttgatctattaagatgacacgagaatctttcttctctatttgtttagcaatttcgcaagatccatccgtagagccgtcattgactaatattacctctatattattaaaagattgagacaaaatactattacaacaatcttccaaatattgttccacattatatataggaacaataactgataccgctgggagactcatactaatatgaatttacatgtttcaaaaaaaggtcaaaccaatttataaaagaaggcagatcaaataaatgcgaccgttcagaagctttcttttgaactaaaagcaattgagtacgattagaatctaaataattcaatatatcaatagcttcacgttccgtctcaaaaagatatccagattcattatcaacaacataatccgatatagatccaacatttgaagctacaacagctaatcctaccgccaaagaagttgtaataacattacttccaacagtatcattcatcacatttaaagacacatcggactgtttcatcaagtccaacagcaaagactcatctatatatttatataactgtacattagaacaattttcaaaaaaaacagagaaatcttttttacccatacaaatacaaaaatcaatatgcggtaaagattttacgatagcagacaatttctcatatgatctttccatattccccatagatataactttcatacgattagttgataacaagaattgccttgaagaataaaaatcagtatctacgtaatgaaatgttctttcaagtttatccttatcaacccctatattaacaagataatttctcaacgaacttcctaaaaccagcaatttatccaagtatgacacattcaataatatttcattcttcgaatagtaatgagatatttgcttaggaactaaatgagctatagcaaccaatcgaactttcccatgaagaattttcgctataacagattgctcctgccgtggagataaatactccatcagcagaacgcaatcatcttttttcacttttagccttaaatacagacctataataatatttaaaagtctatagacaggagataaaacccctgcatactttgtaggagtagatatcacagaaatcttgtttctagattcttctttcaattttttagccagataatacattcctgcatgattctccttcgtattaccaaaaacagcaacaattatatatactctcattgtaccctcatatattatattaattattattaaaaatttcaactgcaacggctctatgagtgattaatctatgctcatagtccacggcacccaacaacacattttcgtatttccacatagcattactagaaacacttactaatttaaaaaaacagaagaaaagtattaatgaaagtataatcaccctatttgcatttcgaaaatacacatgcagcaaaagtggtaatataacccacaatataaatcccaatgaatattccatcctatctgcaacaattcgcatatctgtcatccctaaacttgccactatataagcaaaaaaaatatttacaataataacattcctgtcatcagaaattattttatcatatttacaagcaaccaataaaaacaaaaacgctcgcataaaatacccaaaagtaaatcctcttgacatcgaaaacacgtcactagctgcatacgcatcaactttatcagaaatagtcccccctagactagagacaagaggaaaaatcaatgaagaaacaactggcaacccgagcaaataaataaaattcacaacaacaaatattacccaccaaaatttcaatccaaagtttttaaatccaataaagtaaaatacaacatacaacaaataagatctatgaaaacttaatcctacaaatgtaagcaacaataagttcatacatttcttccgatatatagaatctattgataaaataaatacaagtaacgccttaacatttcgtaataaatccagctctaacgcagaatgaatagcaataaaaacaaagaatgaaaacgcataattaaaagaatagcgagagaaaaatttatcaaaaacccaaacatctatacaagttgaaataaaaacaaaaaagtaccaattattaaaaatcgtcttaacgactgattgatacaatatatatcccggctctaccgcatcaaattctacaccagtagttgttattataaaaaagctatcaatggaaatatcacgcagtgtatcgattagctcaaaagaaggataataaccttgccaatcccatcctacgaaacctctcaacccataaaataacacaaaaaacactatacatataagcctaacgcttttatttgttccttgtcggtactcataatatgaaaggaacaagaaaataaaagacatcaacaaatatggaatactatattctacactataaacaggactcatatattaagcacatcgaataaaccctccaacaaacaaaaatttaaataacacaaaacatgccacagatatttatggatatataaaaagcatcagcactttctactcgccaagcaaaaatatttcattttcaagctataataagcaatcttattaaaacttaaaagcaaacaaaaaacgacaaatcgaataaaaatatttaaacaataaataacagaagtgattttccgaactaacgaactagaacataatttataatatttacaacggctttcctctaaacatttgattctattttctgatattttttgatacccaaaactttttccctctaaatgctgaatgcgactatcgggaatagatatcacattataccctgcacgctttatcctaaaagtaagttcagtttcttcataatacataaaaaactcatttgagaaaaatcccacttcatctaggactttacgcttaaccatcatatcagctcctattatatacccaacttctaaaaccttacctgtatgattaaaatatgtattacgtccccaacaaatcttctctaaaaaattattaaataagctattcaattcccaagcgacggacggaagcatcattctataagattgagctggattcatacacccatcatacaagtttcctccacaagcacccacattcaaatttaaatctaaaaaatcagacaaaattttaaccgcattatttaacagcacagtatccgaattgagaaaaagaacatttcgccccttagataaattgattcctatattattcgcccttccaaagcctaaattttcaggcaaatatttatatattatacgatcatcataaaaaaaacactcatagcttccatcctttgacgcattatcgaccactataacctcgaatgatatatctttcgttttttcgaacaagctatcaatacattttttggtaatatccaatgtattataattaacaattataactgacacatccatacaatcaaatctatttttcaaatataaaaagccatcatcaatacacaataagtaaggataagaataaacagaggcttatttgtccgtaattttttatcaagacattcacatactacaaccctacaacacataaaaggtaaaaagaagagataaaatataaagaatatctttttctatattaaaccacggaaataagccctattcgcatatatcagacaaaacaagcttaacaaaaacgcacatcccactcctacgaactcattctcaatccaccgtccacatccccaacaaactaccacacttggtaaagaatacaatacactttttccaatagttttaacagaaatcaatgttaatttatgcgatagtacataccacagatatgctcccgtaaccacagcctcagaacataatagtacaaccgcagagcctacactttctatataaggaaccaccagcaaattaatcaacaagctgacaaccgctcctatgatcgatgctaccaataacaccttatccttcttcatcggcatcaatacctgtattgccaatacctgagccacacctacggcgaacgccgctggcatgataatccgcatgggtaatatcgctccctcatagccgggaccagataggatataaacaatctgaggggccattatcatactacagaggatcaaggggatgcagcaagtcgacatcacagagaacgaacgattcaccaattcttggaaacgatccttctctccattcgccagcaaggaactcatccgaggcaacatgacattcgtgaatgcggtaaagaaacccaagaccacggagtacagcttaaacgctgttgtataataacctacctccgtgttattagacaccagtcccaaatacatcacattaaaggtgagatacatcgaggtcatcaacgtataaatacccaatgtcacgttctgtttaagatacttgaataattgaatattattccatctaacccgtacgaattctcgaatatataattgattgataagagcgttcaatacaaccactcctaccgtgagtataaaataaagtcgatagtccgacgtatctcttacgaataggaaaacactgattatataaagaacttttataaggatacttctcaacgtaatataccggaaattctctactcccgtaaaaaaccattccactagaaatacggtaaaaagtatctttgccgttcctatataaaacaactcgtcatattgacacagcttaggtattgtcactacacaaagtagatatatacccaacgataccaaggtgaataacagattcaaggctaacacgcttgaatacacttgatccctacgtttcttatcctcttttaccgccgctatctctcgaacgcctaggagcccaacccccattgtagcgaacaataagaaataattcaccgtattatccacaaaattaaccaaaccgatacgttcaacacctagcacccgagccacgtatggaaacgtaatgaaattgatcaaataagaggaaagagtcagtacgcttttataagcgaagtttttctttatagaaggttgtaacatgagtaataagcactcaatttagggcacacaccctcaaaagggcaccgtacagtgtcctaaaccgagttctgtaaaaaattaattctgattttaatatgagccagtgtcccatgtaattgcatcggatatcaaattccgcacataaatatacgcaaacaattcctccaattcattttttaaatgagagagaacccaggtgtctgttgatcacgagccacgaagccaaagatacggacatttacgatttccacacacctatcccgataataattctttacttatcgcagttgttcgctctctttccgttcccgattacgcttaatcagcccattcaagcctacatgcaatatactccagcaaaagaggtttaagaaaaacaaataggttatgtcaacacgccatgccaacgagctattaagcaggataaagaaagcggaaatcgcaatgatacaaaccatcaccatccgtacccgcatccccgtgcgcaacaacttatgatgaaagtgattcttatccggcaaaaacggattcttgtgctcacgcaggcgatgcaagaccacacggatcacgtccagcagcggaaccagtaccgtagagaaagcgatcaccatgtacgggttggacaatgtcggagagacctcgttcgtcacgctcatgtggatgatcaggaagctgatcacgtagcccagcgtaaggctgccggcatcccccatgaaaagcttatgtccacggttggcgttaccgaacacgttgtagcaccaaaagggcataaggatacccagcgtacagatcgccaacaaggcgtaaacatactgcccacgaagaaagaatatcacgctcaagaccgacaaggcgatacaacacaggcccgaggccaggccgtcgataccatcaatcaagttaatggcatttgttatatataccacgataaacaccgtgaacggcacccctacccaaaccggcaccgagtaaataccgaacaagccaccaaacgagtcgaaccagttgcctgacagtaccaacagaaacgccgcagcaatctgcacggcgaacttatagcggtagcctacaccgaccagatcgtcgcaaacacccaccagataaagcagcgtcatgcccacgaacaggaacaggtactcataaagcatattgaatgacaagccggacacgttcacatcccaaaagtacagacgaaaaccgatcaccaggaacatcgacatcaggatcactggaaaaaaggacagcccacccagacgaggaaccggcatcgtatgtaccttacggacgtccgggacatcatagagccgtttcttatgggaaatcaccaagatcctcgggatgatcaccatgccgagcgatacggcaaacaggaaaccgaataatagaaacaaagatgtttgcatgatcctaacgtataagattatttctttctttcatccatcttcccccgcatgtaagcgatataccgctccacggcttcatgggccagtcggcggaaccgatcctcgtcatccagatgttcccaaaggaggtccaacagacggacatagatgctgaaatgcatgtctataccttttttaaagcgttataggtactgccgcccatacctccggttacgcagacgatggatttggtcagcttggtgactttcagcagcgtgtcgatgtaatcacccagacggggaaagaattgttgtcggtacatatgtgataatcgtattaatttctctgaaatccgtacgtgtggggatacggcagtcccgatacctcccggtcgtgccacgaccggtaatcttccgcagggaaaacggggacggtcaatcgcttataatccggctcgtctatccgcaagatatgcttgcgggcgtacgaacgcagcgagcgatccgttacggacaccatcacgaccggaaacggatacccgaacaggcgcatcggcgtggtctcgctgtccgggaacgcacgacgcaactgataggccgaacgctcgaaggcaacccagtaaggccccgtacaatataggtgcatggaggtatggttcgcacgctcacgttccatgatctcgcacaaatggtcgttcagcaacgccaccaaacgaacgccggaaggaagggtagacatcaaatttgaattatgaattttggattatgatttaaactgtcaactgccacttctcaactgtcaactgattcgtggcccagccatctatcatagtcgcccagccggtggatcaaggataatttacttttcttaggcgagggatcgacttgccaaggatccactagctcgtgtgccatgcgacggtagagagcgttatccgtacagccgtacaaggtgaccagcaacagggcacgggattgcggtgctttcacgacaggcaataagccgcgcatcgtgtcgtgcaagcgaacgaaagcctcctcatcgcccgacagcttataggtcgggaggagcaacgcgcacagcttgcagcgcatcacgtctgtctccgcacgcaaagaggcatacccccgcagtacctcgccggccaatcgtcgatcctcctcgcagacactgccggaagcatggtaacgtcccaaggcctcgtgcaggccctccgacaggcggtcgttgtccagatgggtataaacgtgcttgctcttcgtgttcaactcgatcaactcgtactcacccgcctttacctcgaacaagggtacccacatgcaatccagtatgcgcgccatcacctccttatgaccgccgcccggctggatcaccacctcggcctccatcccggtaaaataaccggacgtgatgcgtacccgatcccccttcaacaagcgggtactctccggcacgtacaccggaagttcgttggagtaagcctccgccacccagcgcaaattcgccatctcctgatccaagaggtgcgggaaataagtcgtactcccggaagagacacggggaaggaaattatacaaggggagtgcctgcttcatgcggaaaatttcctctaccgaagaacggataaacacgtagttgaacagcaaaggtcgcctcgtgttgaccagcttgccacccacctttcgcacctccacgtacgagggggcgaaatactcgaaaagagcctctccccgacgttcccgccgggaaagctccacgtccaagcctttggagggactgatccggtcacgccgtccacccgcggcggtaggaagcgtgagcacgtaccagcgcacggctttcaagtcatgacgcttgccggcctgtgtcaggccccccttcggacgatcgtttctcaaaatacacgtcggcatgattctcttttccctaagatatacgaggagttcccctctgattaaacgacaattcaaagccctgccaaacgtaccctatttacgcctaacacacagcactttaagttttcaaatatggcatttctgaaaattaccatacctagtgaatatttagctactcgggaagtagcgtaaaaggaggtgaaaattacccagctgtagagacggagcgtgctccgtctcccatcgtctgacggtaatttaaataccattttgaggagatgagacggggcacgccccgtctctacagggatacacacaggttatggggcatggtggaatgataccgggaacaagaggtcgtttcacccgcgtcaccatgtctatacgtttaggataaaatgggaaaatcaaagaatcgagaggatcaaacgcctacaatgagtaaacaagcggatctattcgcttgtttttagttattttttactatattcgcggcatgaaagaatacgctacttcccgagtagctaatctcttaccccacctcggataccggtttatacacgctctcgaagcaagcccggttcaccgccgacagacgttccaaggaaaagctcttcaagtaaatttgcgtggtcttgatagacgtatgccccaacagctcgctgatcatctcgatcggtacgtcctgttccttcaaggtcgtggcgaaagagtgacggatcgtgtacgaggtgaccggctcacccacaccacaagtctccgccagcgacctcaagtcgcggttaaagcgcagcaaggcgccgttgtattccgcataggccgcctcacccgttttcttcccgctcagaaacgggaacaggtaaggcgagtccttgtccgtgcaaaccgccaactcatccaacaagagccgtacatcggccgggatctccacccggatgaaagacccgctcttctgacggtggtacgacaagaccccgtccttgacattctctttccgcaaatgggcgaaatccacgaacgccatcccgctgaacgagaacatcaggcaaaaacacagctgggttctccgcatctccggctcaactctcggagtccccatcaacgagcgcaagctatccagaggcaacgccttcttccgcttgctctccacgcctgtaaacacccccttgaacagattcgggatatacgaaacctcgccagcctccaccgccaagttatagatatgccggattcgccgcatataggtggacaccgtattgcgcatacagccccgcttcgacagccatgcctgataaagcaagagcctctctttgtctatataggcataagggatttcctccatcccgcaaaaacacttgaacgagcgtaaagcgtccagataactcttcgccgtggaataacgccccacctcacgaaggtgggctatataagccaacataccccccaccacgtcttcttttttcatataaatcctccttaaatccttgtttattctgttatcttttatttaatcatgtcaacaccattaacattgggacgaactgttcgtcccgcactttattttattaatccgaccttcaccgccgttaatctaagaaaaagaatacatgaaaaatgaatttaaaatgtcccttttcgcagccccgatctcaccggtcaaagatagcctaacgggacgagtatcacgaccggctaccgtatatcccagtcgagaagtcaccttacaggaggtggcccgactcatcaccggcgatccggccctcgaacgcctcacccggcagctccgcctcccgcttgagacgggtgacaaggaacgattcagcgagctgaaacggcaaacgctaccgtatgtcacgccttgcgggactttctcctaccggaaaagcgatcggctcctagccccgagcggattggtggtagtggatgtagacggattggactctaccgcggaggcgaaggccctccgaagacagctgttcgacgatgcctacctatgccccgccctctgcttcatcagcccgagcgaacgaggcgtaaaggctttcgtcccctatccggaacatcccggaaacgagacacccgcctatatctccgagcatatcctaggcgtaatgaactacgtggaatatgtgtatggcgacggagagacgcgaggctcccagaaagtagacccgagcggcaaagacatcgtccgctcctgtttcctatgtcatgatcccaacgcactttttaggatttgaaatctaactcataaatcataaattacatgtcagacagtttatcccgcttagtagaagcggttcgttcggcgggtgtagatatcgcccccggatattgtgaatacgtgcgcttggcgtttgccatcgccaacgattgcggcgaggcaggacgagaagggttcatcgccctgtgttccctatcggtgaagtttaaccgggagaaggccgaacggcttttctccaacgccttgaaaaagggagaccacaggatacacctcggtacggccttccacttggccgaactggcgggcgtacgcctggagcctccaagccgcccccgcgatacgcacgcaagtaatgcaagtaatgcaaataatgcagcacctgtttcccacacacgtgcgcgcgataataatgtagagatcgagatcgaggagcaggtcgatccgttcacccacctgcccttcttccccgaggggcatgagtggccccggatgttgcggcagatcatggcgttcggacagagccgggagcaacgggacgtactcctcctcggcgggctcaccaccttgggcgcctcgctcgcccagacgctgcggttcctatatggaggcaaatggttcttctccagtttgcaaaccttcatcgtcgctccccccgcctccggaaaaggcgtgctcgcatggacgcgaatgctcgtgcaaccgatccacgacgagatccgggcgaccgtggcggaggagatgaaaaggtataagaaagagatgacctccttcaattccttgggacgggaaaaggcgaaagccgaggagccggaaatgcctctcaaccgtatgtttatattctccggcaacaacaccggtaccggtatcttgcagaatatcatcgactcgggcggcgtggggatcatctgcgagaccgaggcggacatggtcagcaactccatcgcctcggattatggccattggagcgaggtgatccgctgctcgttcgatcacgacccgctcagttacaaccggcggacagaccgggagtatcgggagttgtcgcactcccacctgtcggtattgataagcggaacgcccgggcaggtgaagccgctgatcccttccagcgagaacggattgttctcccggcaaatgttctattatatgccccgtgtacttcactggatcaaccagttcagtctacagcggaccgacacgtcgctggagttccagaaattgggcaaggactggatcgctcacttgagagagatccagaaactgggggtgatctcgcttcgcttgaccgacgcgcaaatcgtctccttcaacgaggtgttccaaaccttgttcgagcgctcccggaagggcaccggcaacgagatgaacagctccgtcgtacggatggccatcaatatcggacgtatcctgtcgatcgtcgccctattgcgaataacaggggaatgcgaggaggcgggagacttcgccgccagcctgcgcaagtcgccccggctcacgccagacccgcagacctgctccgacaacatcaaggacgggatcatcacccgctgggatctctccatccaagaggatgatttccaagcggtcctttccttggccgagcctatgtacctacacgccgtacacatactctcgttccttcccgccaacgaggtgaagaaccggggcatggccgaccaagaacgtctcttcatcaccttggatacggatttcacctatcaatccctcttggaagaagccgagaagctgaagatacccaaaaacaccgcatgcagttgcttgcaacgttggcagaaacagggaatcgtccgaaagggagaaaaacgaggggattataagaaaacataatccctcttcttcctcttcttttaagtatgtacgcacgtgtgtgggaaaacaggtactgcattacttgcattatttgcattactcgcataagtcgcacgccccacacgtacaccggcatcgcctcacgcctacgcccgtacagggccacgccgatatacgtgtgggctaacgtcaatatacgcatgaagcgatgccgatatacgcatgcgaaagcgaacatggaagatcctcgttcaaggacggcccaaatagcgaaagatcagttccacttgcagggaggtgaaaatccgctgccggttttggtaacccgtctcatccagctcatggctgagcttctgatgatgtcggacccatcccgccaagcggttaagagcggaacacggactgatatcgggagcataggctatggccaactcccgtttgctataagggcgcaccggccactcatccagatattcgttgtttgtttgcataaaataggtgtttttcaattcatttacaggaataaagatactgaaaaagtacgaatccggcaacgatccgatccactaatattcatcttttatcaccttattcccctcgatttcacaccgcctctacgagactcattccggaggaaaccggaagtcgtacattcgtaatcgaaaacagatcgatcccattttcaattatcaattatcaatttttaattatcaaaactatggcattaaattacagtgtggcccttcggcccaaccccttgaagaaagacgagccggcgaaagcatacgccacggcacaggtcaatggagagctgtcgctcaagcaactgagccgccgggtatccatgcaaaccaccgtcagccgtgcggacgtggtagcggtattgatctccaccgtcgagaacctgcttgatgccctccaagagggaaagcaggtggatttcggcgatttaggcaaattccgtctacagatactcaacgagggggcggagagtcttgagaaattcacatctacaaacatcaccggtgtcaacatccagtatataccgggtgaggacctgaagaacatcttcgccggactagagttccagccggtggccagtcgcaaggctcagcaagccgtgcttcgtgcggagaaggccggggagacctctgtcgatatcagcaagaagcccgcttccggaggggacgactcggaatcgcctgacgagatctagcgtgtcacttttggcttacacccaatcggtatgtcacttttggcttgacccaaaagtaaccaaaaggtcaaggctgacgctgacgggctacttcgagacctgcgctcgctgtcgcatcccaactcgctacgctcaaacagggatgctccgggcgctcgctacggtctctccgcttcacgcccgtccgctgaggccgtccaaaggaaagcgtcgctttcctcttatatcagccgggatatcattattcattattcattgttcactattaattattaattatcatgaagaagtctgtttggagtaccattctcaaagtgatcatcgctgttgctaccgccatcgcgggggccttcggcctgcaagcttgccaattgttttagcaagcctcccccacccgttcccactccctaaagaagacaacctccccaaaagaggacaccctctacccagaaggacagtctttctcaaggggccggcctctcctcaaagagccgggaacggctctccatccggccttagcgggcgggcgtaaagcgaggcggccgaagtgagcgacaggagcgtccctgtttgagcgaagcgagttgggacgcgacagcgagcgaaggccgacgagtagcccgtccgcgtcagccttgaacttttggttacttttctttcaagagaaaagtaacacacaaacaaaaaaaagaataaaaatgaaacaatattgcttttaccagaattacagggaggttcgcctccttgtaattcattgcagcgcaacacgctacgaccgggattttccagtggaagcgcttcggagcgcacacaaggatcgtgggttcgccgacatcggctatcattactatatcacccgggatggcgagctgcaccgctgccggccggagaaccagatcggggcacacgcttcgggctggaacgatcacagtctgggtatttgctacgagggcggactggatgagcgaggacttcccgcggatacccggacgtatgcccagcggtgtaccttgatggacctgttacggcaattacgaagggattacccgtcggcacgtatcttaggacattatcaactcagcaccaacattcgcaaggcttgcccctgcttcgacgcggagaaagaatatgcggaattgtattaggcttcgtgatatttgaataggcaacagattttttcgtatgtttgcggacaatatagaaaataaacaaaaagatacgacatgaactactacgaacttagtttcacatacacctcccctatcgagaaagagattatcaatgacgtgctggccgccgagttgggggaaatcggttttgagagctttacggaaagcgagaagggtttgctgggatatatatccgaggctttatacgacaaaaagacattggatgataaactggccgactttccgctagagaatacccggatcgattacacctccaaatgggtagaaagcaaggactggaatgaggaatgggagaagaattatttcaaaccgatccggatcggaaacgaatgcatcatccgtgcctccttccacgaggcggagcccggttatacatataatataataatagacccgaaaatggctttcggtaccggcaatcacgaaacgacttatttgatgataagcgagatgctgaaactagacctagaaggcaaggagttactggatatgggatgcggcacagccgtgctggccatcttggcccggctgaaaggagcgaaacgggtagcggccatcgacatcgacgaatgggcttataacaacgccctagagaatatccgcctgaatcataccgaagacatacaagttgccttgggcggcgccgagaaaatcaaggaattcggactattcgacatcgtctttgccaatatcaaccggaacatcctcctgaatgacatttgtcaatatacaaacagtatgaaaccgggaagcatcctatttatgagcggcttttatgtagaagatatcccggcgatagaagcagaatgtcagaagaacgggctgaaattggattcttataacgaaagaaataactgggttgccgtgaaggtcttaaaaggataactttttttaacagcaaaagttaagacaaggataaaccttaatccaaataaatacgttatcttagtggaaacttctaaaaagaaaaagttatgaaaagcgtagattcaaaattattacttggccttgtagtaggcgcggctgttggtgccgctgtaggttatttggcagcgacagataagagagaacaattactggaagaattgaacggtgttgtcggaaaagtaaaagaaggttttaactccgctcttgccaaatataaagaaggaaagcaagaagtagtacaggcaacagaagaaatcgtagctgaataagctttgtatggagaaagattcaggaacagtcttccgtgagctgaaagaagatgtatcggcttatgtggagttaaaacttgagctcctaaagttgagcacatatgagagaacgggtaaagtcatagccgttctctcatatggcttgatattattgttcttggcgttcttcgccatcttgttcatattcttggccttgggcttcttcctaggggattggctcggctcctccgggttcggattcggtatcgtggcggtcttgtacctgctacttatcggcattataataatgaatagggacaggatcagcacaaaagtattaaatgaggtaatagccgccatgacggcgaatgacgataaaaataacgcgacaaacgatgaacaaccagcaaaccccactggagaaactgatttctgacaaggaacgcatacagagacaatgtaagcggcaggaacagaaattgaatgaggatttctcttatatacaggagaacgccggaagtttgttgttatccggactatcgtctctccttttccctagcaataagtcaacgacaaaaacaaacgacaagagcacagctcccgtaacggccggacaaccctccatcgctttagggatctcagactatttatccatagcgaaaggcatgattcccatcgcttgggatctcgctcaaccatttattatgacgtggggaatcaaaaaagcgaaaaaatggttctcaaatctcttattcaagaaaaagaaataacctccaacaattaatttatgttagagggcagtttttttctcgctatattataaggctcaatacaaaaaacatgactacatttgcagtcgttaaagcaaggataaaatgaatatctactccttgcgatggataagagataaaaataaagacttattattaataaacccataaaaagttttattacaatgatcaaactaggtattaacggttttggccgtatcggacgtatggtgttccgtgctgcagttgctaactttggcaacgatattcaagttgtaggtatcaacgaccttttggatgctgattacttggcatacatgttgaaatatgactcagtacacggtcgtttcgacggcgaagtagctgtagaagacggcgctttggttgtaaacggtaacaagatccgtttaactgctgagatggatcctgctaacttgaaatggaacgaggttgacgctgacgttgttgttgagtctactggtttcttcttgacagacgagacagctcgcaagcacatccaagctggcgctaagaaagttatcatgtctgctccttctaaggacgctactcctatgttcgtttacggtgttaaccatacaacttacgcaggtcaagacattatctctaacgcttcttgtactacaaactgcttggctcctatcgctaaggttttgaacgacaagttcggtatcgttaaaggtttgatgacaacagttcacgctgctacagctactcagaagactgtagacggtccttctaagaaagactggagaggtggtcgtggtatccttgagaacatcatcccttcttcaacgggtgccgctaaggctgtaggtaaagtattacctgtattgaacggcaaattgacaggtatggctttccgtgtaccgacttctgatgtttctgttgttgacttgacagtagttcttgagaaagaggcttctatggctgacatctgcgctgcaatgaaggaggcttctgaaggcgaattgaaaggtgttcttggttatactgaagacgcagttgtttcaactgacttccgtggctgtgctaacacttctatcttcgacgctaaagctggtatctctttggattctaacttcgctaagatcgtatcttggtacgacaacgagtggggttattcaaacaaagtttgtgagatggctcgcgttatcgctggtaagtaatttattaccactctacatagaaaaggctatcctctttgaggatggccttttttttcgtacgtttgtatcatgaaatcatatgaacttatcacgattctagggcctacggcttccggaaagacgaccttcgccgccgctctcgccgcccagttggatacggagatcatcagcgctgattcccggcagatctatcgttctatggatatcgggacgggtaaggatttggccgattacaacgtgaatggaaaacaaatcccctatcacttgatcgatatctgcgagcccggctataaatataacgtatttgagtatcagcatgactttttccgggtctatgaggatatgaagcggaggggtaaactcccgatcttatgtggaggaaccgggatgtacatagaggccgtactaaaaggatataagctattagacgtgcctcaaaatcctgagctaagggaatccttgaggaataaaaccttggaggaactggaaaccatcctcgcctcttataagatattacataataaaacggacgtggacaccgcccagcgggctatccgtgcgatcgagatcgaggagtattataagactcaggcaccagacgtaaatgaatataatccgatcaacagcctgatcatcggtatccacatcgaccgggaattacgtagggaaaaaatatccagacgcttgcggacccggttggacgaaggaatggtggatgaggttcgtacgatcttggctacgggtgttaaaccggaagacttgatctattacggattggaatataagtttcttactttatatattatcggggagctttcttttgaggagatggtctcgcaactcgagatagcgatccatcaattcgccaagaggcaaatgacttggttccggggcatggagcgccggggttgcgagattcattggatagacgccactctaccgaccgaagaaaaaatagcgacaacaatgcgaattctaaataatcagctatgataacaataaacgatctaaataaaagcgagaacttcttcttgatggcaggtccttgcgtaatcgagggggaagatatggcgttacgtatcgccgagaaaatagtgggtatcacggaaagactgcatataccctatgtattcaaaggctcctatcggaaagcgaatcgctcccgtctggattctttcacgggcatcggggatgagaaggcgttaaagatcttacggaaggtgagcgagacgttcgatattcccaccgttaccgacatccatgagacaacggaagctgccatggccgccgaatatgtcgatgtccttcaaatcccggctttcctatgccgccaaacggatttattggtagcggcggccgagaccgggaagatcgtcaatataaagaaaggacagttcctttcgccgggtgccatgcaattcgccgtacaaaaggtagtggacgcaggaaatgataatgtcatgatcaccgagcggggaacgacattcggctataccgaccttgttgtcgatttccggggtatcccgcaaatgcaaacattcggtttcccagtcattatggatgtaacccattccttgcaacagccgaaccaaacctccggcgtgaccggtggattgcccgcccttatcgagacgatagcgaaagccgctatagccataggcacggacggcctgtttatagagacccacccggagccaagccaagccaaatccgacggggccaatatgctcagactggatttattagaagatcttttgacacgtttggtacgtttacgccaagcgatcctataaaaaataaggggcccttactaagggggcccctttatttcttatttttacgatcaataatctaattatcccatcttgctgattttcttcaaccgatcttcatctatcaacttaatctttctaccgtctaaagcaatgatacgttccgccacaaaggtagacaacgtgcgaatagcattcgatgtagtcatattagatagatttgccagatcttcacgagccaaatagatgcttaacgtagcaccgtcttcttccagtccgtaactatctttcaggaataacaaagattcagctaatcgcccacgaatatgtttttgcgtaaggttaaccgtacgttcatccgagataccgagatcaatggataattgtcggatgaaaaacatagccaaattcggattactcattaaaaggcccgtaaccactgtcataggaatcatgcaaaccgtagaagcctcgaatgcggaagcgttcgtcaagtaatcttcttgagcgaaactagcccggtaaccaaaatactgcacaggcttaatcattcggataatctggcttctgccacctactccatccttgtaaatcttcactttaccctttaacaagcacatcatgtcctttggttcgtcgccctcgcaataaatcaactcgttacgtttgaaatgctggatcgtcgaattactacggaggatctcacgttccttatcggtcagaaccctccacacctctgataaactggccgataaatcgacctcttctttttgctgtttaaccacgactgctatataacatacttatgaagcacaaatatacgatttttcttttgataaaataaaaacttttgtacgattaattacaccatattgtaacattttactttctttcacgtctaaactgaaatttattcattatgtttgtctggaaagaatgtaaaatcgttgaaaaagttatattcgatacttaccttgattttaatctctataagtattttcgcgaagagcactgatacttatagtgataagatcctgtcttttggcaaggggaatcgagaaacgagagaacgggcggactcgatcatgcaccttgttatcgaaaaggcaacccaataccaaaatacggtatcgaaatatgaggctgagatctatatcaaaggacgtacagaaattttaaaacaaaatatgttaatacgtctcgcccaccatatcttccctatcgaccgaaaaaataaggatatgctttttgagatggtcagccaatctaaatttaacgctccgcagaactatcttcatgatctaaaggcggtcaacggaaacagcatacccaacgggaaaaagcagcaggaggccttggccttcttgaatttgaacgtatactcccctaccgcttacgatgatgctatcttcatgccgatagctagcaacgcttttaagttttatacgttcaatttggaagggctggaaactatcaacggcttgacgatttacaaaatccgtttcctgccgaagcaatggagccagaaattggtatgcggggatttatatgtcatcgaccagtcatggacgatcgataagatcgatatgaacggtcgttactctttcgccgaattcaacctagtcatgagctacggacgggatttcaggcggttcatcctgcccgagaaggcggatctattcctccgatacagggtattgggaaacgcagtggcaaccacctaccattcttcctttaagtatcaggaagtggaatgggtggaggaggacaacgaaagccataaatggaaatccttggacctgaccaattattacaagctctcgtccgatacggttcctattatcagggattccacgtattggaatatccatcgtgacaatcccttgagtccggatgaagcccacttatacaataaagcccaagagcagaatataaataaaatcgatacggccgatgatctccagaagtacgttaaactaacggagcagttaacgaatacggtcaatatggattataaaacgacccgtattaaatattccgggcttctgaatccattccaattgggttattccgcccgtaacggcatcacttacaaacagcgattccgtatcagcaagacatttacccgtgacaagcaaattcgttttcgtccggagataggttacgtattcaagcgcaagcagatatttttcaaggttggaggcgattgggaatactcgccgcagaaacggggaattttatcggtagaagtaggaaacagtaatgaaagctattcctccgagatcacccaaaagatcaatgaggaactaaaggattccaccttcaattttgatgatttaaaccttgagtatttcaaacactactatgcggaaataaaaaactccattgagttattcaatgggtttcaattaacaacaggcatctcttaccatcgccgtatcccctctaaaaagaaagtggcgattgatcccggggatgatgtagaggaaatacttagccaaaattataatgactttacgcccacgctcggtttctcctataccccccgccaatattatcgcatggacggataccggaaggagtatgtctattcgtattatcccacgatatcaatcgaaatagcgggaggtatccccggagtcgggaaaagctcgggagattacggacgtatagaggcggacatgcatcaaagccttatgcttggcctgtgcagacgattgaactatcatatcagcgccggtctttatacgcaacagaagtctacctatttcgcggactttaggtatttcacccgcaggaatttccccgatacatgggatgatcagatcggcggagtcttcaatctactgaaaggcgagtggttcaatgcctccgataagtatatacaagcgcatttcatgtatgaaagcccttttgtcttattcaagatcctccgcatcaactccacgaaaaaattcatgcaaacggcctcacgctatatcctctccgaacgcttttatctgagccagctatggacaccggtcttgcctagctatacggaagtcggatacgggatcgggaaccatatctttaatatcgggatattcgccggattcgatcgctggcattaccaaagcatgggattcaagtttgccttcgagttatttcaataaatcgatagtgggcgggctaccaatatccctttacagctctttatcccctcggcgtaatctcgtaaggaggatgcttggatgattacctttttagcggaagaagaggcatggataaatgtcagttgtccatccttccaataggcaatcccgacatgcgtcacgtccagccccttgatagaagtaacaaaacagaggatatcgccattcttgattccggacgaacatttctcgatctcctgtttaggcacataataatgaggacgcaggtttatctccttttccttatcggccatccttcgaaccctttccggatggttcttcaattgcttatagctatccggatgcgtggatataaaagataaatccaaaggtagggaggcaccaccgatctcccgccctatatctttcacgattccttttcgctcgttctcatagaaccagtcggtcatataatgcaaacgatccgtgtaatcatggattgtgccgtctctgtaccggagctgctgtaaattctcacaaaagttctcaaaggtaggattttcttcccgtagggtgcgggataaagccaatacggtctccgcaaatgtagtacaatccaattcctgcagattgaccaccaagccctcaggctccttttccaaggtagaggcgacataaggagtcccccggaagaaaagggcggtatggatcattagctcgtctaggggtaacgatttctcaggttccatctgggtacaataccgatcgaaaatagcacgatcctcatccgtacaatacaatttacggaatgtatgctcttgggcattcactaaaaacaccatacacacacacatccaaaaaccgagcagtatcattccccttctcataagctaatcctttttcgttttcaataaatcctccaatttcaccagctcgtcacggaattgagcagcctcgatgaaatccagtttcttcgctgcttccgtcatctgtttgcgagtccgctcgatcgccttctcaagctgcgtacggttcatgtattgcatgaccgggtccgccaccaagcttggttccggctctatataagcgtaaggctccgccgcttgttgtttctcggcaagtaaagagacactgtttttcatgacttgtttcggagtaatgccatgcgcctcgttataagccatctgtttctcccgccggcgattggtctcgtctatggtctgtcgcatactagccgtgatcttatcagcatagaagataacctttccgttcacgtttcgggcggcacgtccggctgtctgtgtcaaggatcggtgggaacgcaaaaagccttccttatccgcatccaagatagcgaccaacgagacttccggtaaatccagcccctcgcgtagcaagttgacaccgatcagcacgtcaaacaggcccttccgtaggtcgtccataatctgtacccgctccaaggtatctacatcgctatgtatatagttgcatcgtacccccatgcgggtcatatacgtagtcagctcttccgccatacgcttggtcaaggtagtcaccaagactcgttcgtcttttgccgagcgttgcgtgatctcctccatcaaatcgtcgatttggtttaacgaggggcgaacatcaataatcgggtccagcagacctgtcggacgtatcacctgctccaccaccactccctcgctctttatcaactcgtaatcagcgggagtagcgctcacgtaaatgcccagaggcgtcaacgactcgaactcatcaaaggtaagcggacggttatccatcgccgagggcaaacggaaaccatactccaccaagtttttcttccgggcataatccccgccatacatcgcacgaatctgcgggatcgtcacatggctctcgtctacgacaagcaggaagtctttcgggaaataatccaacaggcagaaagggcgatcacccgccgcacgtccgtcgaaataacgggaatagttctcgatacccgagcaatgccctaactcccggatcatttccagatcaaaagtgacacgttcatacaggcgtttcgcctcaaagggcttgccaatctccttgaggaaattcacctgcgtacccagatccacatcgatctggccgatcgccatattgatacgctcttgcgtagtcacgaataaattagtaggataaatattcaactcatcctgctcatcatactcctcgcctgtcaatggattgaatgaggagatacggtctatctcatcatcccagaactcgatacgatacgccataccatcgaaagtctcgatcgccgggaagatatccaccgtatcgccattcacacggaaacagccgcttttgaactccagcttattattcacgtacaaggcgtctacaaaccggcgcaacagcttatcccggtcgatacgcataccccgttccagatgcgtcactttctcggcgaatgccgtaggatccgccataccatataagcaggatacggatgagaccacgatcacgtccttacgacccgacaataaggaagccgtggccctcaaacgcagcttatcgatctcctcattgatcgccaaatctttctctatataggtatcggtagaaggtagataggcctccggctgataataatcataataagagacaaagtactctaccgcattatttgggaaaaacgctttaaactcactgtataactgagcggcaagcgtcttattatggctgagtatcaaggttggtctctgaacttcctttatcacgttagcgatcgtaaacgtcttaccggaaccggtaacacccaaaagagtttggaaagggacaccactcttgatcccttccgacaacgccgcaatcgcctcgggttggtcacccgtgggactgaacgaagacgatatttcaaaattcatcctttacccgatctgttgtttaggcattaccaaccacaagataacgtataacagtccgccgaatccagcgaagaaaaccatcaatacccacacgatccgtacgatcgtcggatccaagtccaagtactccgcaagaccggcacaaacgccacctatcatcttattattcgaacgagtcaatcttttcttctcttccatatcttattatatctttatcaatatacaaaactaatgaatctcactcatatttacaagttgaaccaataattcattttgatcatgaacgtatttgtagcggggagtccccacatacgatccagattacttccccagcctgaggaataccagttgtcccggttggacatccggtgttcccatacgaaataaagcgtggagccgggcaagtattcccagcgggctaccaagttggaacgaaactcgttaaacctaaaatcagggttcctaaaaggcatctgcccagctccctccccgatggtatagactccatccgcataagtcaattgatccggatcaatacgttggaaacggttctcaaaggtatgcgacttcgtatccgccgctaatttaaaatcatcgtatttagcgatggaggtgaacggggcaccataaaattgaatggaaatatcgggggtcacgttcacttgtaatttcagcgtgagaccataggtcttctgatccatgtggcccatgacataataataaggggccaagctactcgagctaagcggactcgtcgtagccacatattgcatctcatccgtattccacgcataatccagttgaccggacaaatagacatggtttcccaagcggaatgtcaagctcggcgagatcgtattgaagcgatttccctcgaaattatgatcgccctcgtatttgagcatgaacatcattcgtttcgccttatcggtattgaacttagcggaagttaagaaataagaaccgaagcgaacatccggtccccctcgcagcaagcggctatccagccaattccaagcaaaggtttccttgacatcccattcataccggttcatcgtcatactttgccaacgcaaagaagcgttgttgctaaaaggagtaccgccgtaattccacatattcttttgggacagggtaaaggcgttgtaccggaatatcttccagatatcggtctgccgatacatgatctccgtctcattcatcagataatctgtctccttcatatatcccatatcattcaagtcgaaaccgggtgacgaccaagtaaaggtctccgagaagttccatttggcgtttcctttccgtcccactttcacataaccacccgttccggtcagggagcgacgggtaggatccacccccagataatcggcggaggaagccctttgataataatgcgccacgctattctgcaaagccgtgatcgccccggcgctaccatgcaaggaactcaacattccctttacatctatataataaaggcgattcttgaaatactggataaagtcaatacccgccgtgaaagcgttacgcaccatgaaatcctccagataaggctgatccaaggcacggtttaccgaagtcaccataccgcccagcaaggtattccccttccagttcttttgcacacgggccacggtatagtttgtcaaaggctccacgacttccacatcctccaccccgttacgggtaaccttggaggaggaacgtgccgttacactctcgatcactccgatcgtcaagccccgtttattcgtacccgtcagtttcaacgcaccgataatcggcacattctctttcgtctcggcataactgcctacgttgtctataccccgtggcgtataagagggagaggcgccgatcctacgggtataaaacatcatatcgctaccgttcgcaaaatccaaaatatgttttccttccaagaagaaggggcgtttctcatcgtaaaacgtctcgtaagccgtaaggttcattacggaggggtccaactccacttgtccgtaatccggattgatcgtcatatccaacgtataatccgagagggcgaacttagcgtccaagcccacgtttcctccccagctatgccctttttgataagggctgccgtctatccggggttcctgcctgtatttacccattacatacggcaagaactcgatgccgcgaggcttgggaacagagtccatgccgctcatgtttccgaacgaaaagacatgtccgttattcttcaaggggatcatgctccaattttgcacctcgttattcctacggatgatacggcgtacatgcaagccccaaacgccatcctccgatcgctggttataacgcaactggctgaacgggatacgcagctcggcggtccaactggaatccgcccggttgatattcgttcgtccttcccaaacggcgttccagctaaggttgacgttcaacttatccgttacgaccagatccgtcttatttcctcctagattgatattgaattccggtgccgcacgataatcatggtaggtgtcgaaagcgacgctgatcaaatcgcccagactattatcatcccggttcccgataaaacgattcatcttatccggcacggcgtccttgcaatatacacctacatagatatatttatcatcatagaaaagttttacccgggtcggggattgagtgatcgcccgctcataagggataatctgtacgaaacgatccgaccattcgccttgcttcgtccaaaagtcctcatccaacttaccgtcgatcgtaggtttcactcccgatactttccggatattataggtacgcttataagctttctcaaaagggacgatcgaatcttgctgggcttcgcacaacaacgagattcctaaaaacacgagtagagtcagatatttcataatggcctagactataagataacaataagcctcaaagataagcacttcttttcagaaaagagcacatcttcccaagatttatcgcaacgtagccaaaggcatacgatatcaagtattcactgcaacccgtattgcagtagtactgcgacgcacgtgcagcgctactgcaaccggcgtgcagtaacactgcaatgcgggttgcagtacaataacaatagcgtcacgataaaaatcaacaaccgcctcccaacgcccggtacagcaatatcttcttccggcataaatcggtgacgatatcgatatgctccagctcgctatccagataacgctcctcggcggaaagaacctccaagaaaccggtatagcttaattggaacatctcgccggcattcaccacggaacgttggtgggcaagggattctttctctttcaagcggatacgctccgtttgggtctggctggcgcaatagagatcgagcacctcggtgtaagcgttcaaagcggtctcgtggtattgggataaagcgatacgctgggaagccttcgcctcgttccacatcgaacggatctcattgcggcggaagataggagccgtgatacccgccgccaagtcgtacaccaaagaggccggcgaatgaaaccacttacccacatcaaacgcattgaaaccaccactggcgccaagcaccaacgagggatagaaagccgccttcgccgctatcacatccgccttggaggcgaccaaccccatctcggcggaacgtacatccggacgcaatgtcaagaggttcgctggaatcccttccgacaagggaaccggcaacttacgcaactcatcgaatcccatccggcgaatctcgaaggggaaaacacccaacaggcaagcgatcgcccgctccttctcaccgatcaactgatcgttttccagcaatttactctcgatcaacaacacacgggcataaaactgatcgaccgccaactgcgtctccgccccttccttcttcaactggcgggtcagctcatgggaacgacgggcactggccagcgcattccgcaacacctccttacgccggtccaagccgatcaactcataatattgaatcgccaaatcggagatcaacatcgactgggcaaaacgggtagcctccacggaagccatccagcgagcggcggcggcctgcttcttccgggtcagtttgccccagatatccgcttcccattgaaagctcaagctcaagccgaaatcccggtaagggtccggtatatgcttatcctttggcaaagaaggcacgtttgtctcgctattccccacaccatccatcgtatattcaccgaaacggttcacggaggctccgatgttcaaattcacgtccggcagcaaaagctccttcgcccgctgcaaggccgcacggctcatggcgatgcgctccatgctctgctggaaggaatggttattgcgtaaagccacatccacatagcctcgcaataaggtatcttggaaaaagacatcccacgagagcggtttcacgaacgtagtgtcgttcattcccatctcgccggattccggaagcgagatccgctcgtccatcgatagctcgggagtcttacaaccggccaaagcaatcagagccaaggcgcagcctatcattatatatctcatcttatcaatacacatactcgtcttctttaatttgctctttctcttttctctttttaaaataagtagccagcgactcgaagatcacgtaaagccccgggatcaagaagataccgacaaacgtaccgatcaacatacctccggccgccgccgtaccgatcgaacggttccccaaggcaccggctcccgaggcgatcgtcaacggaatcaagccactgataaaagcgaaggaggtcatcaagatcgggcgcaaacgactggtagccccttgaatagcggcccccatcacgctgataccttccttacggcactggttcgccacctcgataatcaagatcgcgttctttcccagcaaaccgatcaacatcaccaacgccacctgcgcgtagatgttattctccagccctaccacgtacagcaagaagaacgagccgaacacacccgccggaagcgacaggatgaccggaagcggaagcaataagctctcgtattgggcggcaagcaacagatagacgaatgccaaacaaatagcgaaaatcaccaacgtttgcccgccggactctttctcctccttcgccacaccggaccattcggtatcgtaaccacggggcaatacctcggaagcgatctcctcgacagccgccaacgcctcacccgagctgacacccggggcggcctcgccggtaatcatggccgaggtaaacaggttgtaacgggtaatctggctcgggccatacacacgctccatcgtcatgaagttggagtaaggcaccatattcccctccttattcttagcatacaggctgaacaaatcctccggattcatacgatactccggcgccgcttgcaacatgaccttgtacatctggccgaaacggacgaagttggaggaatagaaactacctacataggattgcaaggtttccatggactcgttcacgttgatgcctagcttagccgccttcgccaaatccacccggagcagatattgcgggaaattcgggttgaagccggaagtgacaccagtcaggcgaggatcagcgttcagcttcgccacgaagttcttggcgacctcatccaactcggcgaacgtaccggcggtcttatcttgcagacgaagctcgaagccgctcgcgttaccgaatcccggaaccgtaggcggcaggaagaactggatgtccgcatccttgatatgggcgacacgatcggcatacacgctcatcaactccgccgccgtctgctcccgttgatcccaaggggtcaagttaatcatacccataccgaagctggcaccctccgtctcggtcatcaagctatagccggccaaggtagagatcgtctccacctcttccaacggcaacaaagccgcttgcaccttgttcaaggccgcttccgaacgctccaaggtagctccgggaggcgcatctacgttcacatagatcataccttggtcctcgttcgggataaagccggaaggcaacacgaacgtcatgccccacgtggccagacagaaaaggatcaaggttgcgtacgtcagcatccgacggttcaagaaccatcttaaattcaagcgataacgacgctccaagaaatcataacggcggttaaagccctcgaagaaacgagtcagaaggcccttcttcgcctttttcgaatgagataccggcttcagtaacaaggcgcaaagagccggagacaacgtcaaggcgttcacgccggagatcacgatcgccacagcaagcgtcaatgagaactggcgatagaagatacccaccgtaccatccatgaaaccgaccgggataaacacggcggacatcaccagcgtaatagcgataatcgcccctccgatctcaccgatcgcctttttcgtcgccttcaacgggggcagcttctcgttgtgcatcttcacgtggaccgcctctaccaccacgatcgcgttatccaccacgataccgatagcaagcaccaaggcgaacaaagtcagcatattgatcgagaaacccagcatctgcataaagaagaacgtaccgatcaacgataccggaacggcgatagcgggtatcaacgtagaccggaaatcctgcaagaaaagatacaccacgataaataccaagataaacgcctccagcaaggtcttgagcacgaccgatatggaagcgtccaagaaacgggatacgtcgtacgagatattatattccatacccggggcaaacgtcgtttccttcaattcctccatcttcgccttgatctgctggatcacctcacgggcgttcgagcccggacgctgcttgatcatgatagaggccgagggctttccgtccgtcatggagatcatattataatcctcggaatcaaactcgatcgtagccacgtctttcaggcgaagcacggaaccgtccggcagggctttcaagacgatctcgccatattcctccggcgtgctgaacttaccgctatactgcaagacgtattgcaattgctgcgggatcttgtcggagctgatacccgtcttacccggcgccgcctcgatattctgcgagcggatcgcctccgtaacctcttgcggcgacatattataagccgccaaccggttcgggttcagccatacacgcatcgcatagtcgcggctacccatgatctccacgaatcccacgccatcgatgcgcttcaactcacgcaagatattgatatcggcaaagttatatacgaatttctccgtatgggtactatccgagctcatgatgttcaggtacatcaacatactgtttacctccttctccgtaatcacgccggcacggatcacctcttccggaagctcatccagcacggtggtcacacggttctgcacattcacggaagctacgtccgggtcggtaccgaccttgaaatagatcgtagtcaaggacataccgtcgttcgtacaaacagaggtcatataggtcattccgggcacgccgttgatagcacgctccagcggggtcgccaccgttttcgccatcacgtcggcgttcgctccggtataacgggcggtaacggtaacggatgggggcacgatatccgggaattgggtgatcggcaaggagttgatcgccagcaatcccaagaagacaattaccaccgatatcacgcccgataagatagggcgtctgataaatatttcaaacatagggcttacttattattctcgatttcattagacgattccaattggcgacggatcgtggctccatctaccatatcgggattgatagtcatgccgtctgtgatcatctgaacaccctcgtagacgatgacggtctggtccggcaaatcctgtgttacgtaataagaaccgtggcgggccaacggctcgaagctacgcacgctcacctttccatcttccgctaccgtatatacataggtaaaatcctgtatctcgaaagtggattgctggggaaccaagaccacgttctccatcttggtcagcatccggatcttaccggatacgccatgtcgcagcaaacgttccgggttcgcaaaacgggcacggaaagcgatcgatccggtaccccgctcaaagtcgccctccacggtctctaccttccctttataccgataggtggattggtcggaaaggatcagctccagattattatactccggctggtcgataccgctcaactgcgtccgtttatattccagatactctttctcgttgatcttgaaataggcgaacatatccgatacgtccgtcaaggaggtcaataagctgctcggcgtaaccaaacttcccaccttaaaggggatgcggtccacgtatccctcgaaaggagccgtgatcgtcgtgtacgagaaattagtctccgcacgttgcaaacgggatttggcctgttgcacctgcaagcgtgccacgtccgcctcggccatcgcctgctccagacgaatcggcgagatgatatctttctccaccaaacgcttgatgcggtctacctctacctccgccatcttcaactcggcttgggcctgtttgtgattggcttgcgcctctttcacctcctcgtacaattccgccgaggaaagcttgaaaagcacctgccctttcttcacgtgctcgccctcatctacaaggacggcctccacgaacccttccactttcggtttcacctctacgaactgtacggcttgtacatccgctacataggactgcggcacctcgatcgtggtcgtggttaaccgcatcaccggcgtatgatctttcttcccggactttttctcccggttttggctacaagatacccatacacaagccgttaagcatagtaagggtaaatagttagaaaacaattttatcctcataaaacttatagatttataattatttgaatacgacgaaaagcacataggcgaatcaccccatgcgcgacaataagaaacaggtaagttctactaaatcagataggaacagaaccaaacgaaattctgtgctttgtgtaggttataaaataaaggaagcttggcgcattgccgtagttccaaggaatgaattaattcatgtaaatccagaatcgtaaacaagtcccatatcaaatcgatctccaaggctcggatttgcacttgctcctgacgtaccgttcgcaaggaggcgttatcgtcaaaatccaacaacacatcgggtgcctctttatcgactatttccatcgaggtagtggtaatattctccggaaagaaatcgcttccaatggaataaaactgtaacagcaccaacatgatcataagcatgatacgctggtgaaacccaaaacgattattcactgttacatttagcatcttttatctaatggaggcgcaaagataaacaatctttttgggaagaaaaaacatttcacccgcatacgagtattggtatcgccccacgccggtataggcatgaggcgatgccggtataggcgtagggctacaccaataccgacacaggctcacgcctataccagcacttaaatatatgcttttaccttctcccgatccgtttgcaccgtctcgaattcggaggacacgatactgcttcccatcgggacattctcattgcggtattccattttactatatacgatacttcgggcggacgtatgaaactctttcgctcctgtctccgcctctattttcccgatattattctcacgtacgccacatcccggcatgatgatgatccgtccgtccgcacgtttcaccagctcggcgatcaaggggattcctttcacggcatccgattgctggccggaggtcaagatacggtcgcatcccaactcgattagctgctccaacgcagtgaatgggtcccggcaaacatcgaaagcacgatgacaagttacggacagaggttttgccgcctcgatcaagcgccgcatcaagggtacatcgatatccccgtctttcgtaagacagccgaaaacgacgccatgcacttttagctccttgcacagttctatatccaatagcatggattgtacctcggcttccgtatacaagaaatcaccgcctctcggacggataatcacattgatatcgatcttggaagtcagagccttcgccgtcttgatctctccataactaggtgtagttcccccttcgggtatcccggcgcaaagctctacacgggtagcgcctcccgcctccgcctccacacagctctgggcggagttcgcgcatatctcaataattcgtttcatgtttatttagtattgttgacgtacaaaattacataaatatcaccacttgctcaacagaaccacaaataactatccgataccattaaaaacacctctattatggattaacaaaataaaacagaactgtcacctttactatcaaaaaggcagcaaattcgtatctccttatctatctatgccttagaaatttgactatagctttctgattcgtccaaataagaaacaaattggtctatttcggaactacagctaaatagtttaatgtttaactaatctcaaaaagacacaaaaagttctattttcaaggatcgaaacgccataaaacgtaatattgcaacgacattttaataggttaagataaataacaaataggctttatgggagaaataaaaggctatatctcacaggttatcggcccggtagtggatatccactttgattatgggacagaagaaacagtaaccctcccccgtatccacgacgccatggagatttcccgcccaaacggaaagatcttgatcgtcgaagttcagcaacacatcggggaaaacaccgtccgtaccgtagcgatggatacgaccgacggattgagacgaggcatggaggccgtgtcatacggaatgcccatcaccatgccgaccggcgaccaagtcaaaggacgtttaatgaatgtcaccggcgaccctatcgatggcatggcccagcttactaaagacggggctcttcccatccatcgtgagcctcctaaattcgaggatctgacaacgacccaagaggtcttgtacacgggtattaaagtaatcgatttattggaaccttacgccaaaggaggcaagatcggacttttcggaggagccggagtcggcaaaacggtattgatcatggaattgatcaacaacatcgcaaagaaaaacaacggattctccgtcttcgccggtgtgggtgaacgtacacgtgaaggaaatgacctattgcgtgaaatgatccaatccggtgtcatccgatacggcgaggagtttaagaagagtatggaggcaggcaactgggacttgtcgaagatcgattacgatgaattggctaagtcgcaggctaccttggtattcgggcagatgaacgaaccgccgggcgcccgctcgtccgtggccttatccggtttgacgatcgccgaatccttccgtgacaaagcctctgagggagaaagaaaagatatattattcttcatcgataatatcttccgtttcacccaagccggttccgaggtttccgccttgctggggcgtatgccttccgccgtaggttaccaaccgacattggccacggaaatgggagctatgcaagagcgtatcacttcaaccaagaagggctccatcacctccgtacaggcggtgtatgttcctgccgatgacttgacagacccagctccggcgactacctttacgcacttggacgcaacaaccgtcctcagccgcaagatcacggaactcggtatctatccggccgtagacccgctggaatccacctcccgcatccttgatccgctgatcgtaggcaaggagcattacgacacagcgcaacgggtaaaacaaatcctgcaacggaacaaggaacttcaagatatcatatccatcctcggtatggaagaactttccgacgaggacaggctaacggtcaaccgggcccgccgtgtacaacgttttctgtcccagcccttctccgtggcagaacaattcactggcgtacccggtgtcatggtctctatagaggatacgatccggggattcaagatgatcatggacggggaaacggatgacatacccgaacaggcattcttaaacgtaggaaccatcgaggatgtcttggagaaggccaagcagctgaaagaacaagcaaattaatcgatatgaaactggaaattgtatcaccggacggcattcttttcgaaggcgagaccgaatctgtctcattcccgggagttgccggttcattcgatatcttgcctcatcacgccccattgatagcagcgttgaaggcgggtacgatccggttcgaggcaaacggcaaaagacaagaacaaacgatacaaagcggattcgtagaggtaaaagacgacatcctatccgtttgcgtcgaataaaaacatacgacaatgaatggcagattaaaaatgaggttaatgggtttgatcacgtttatcaacgtggcaataggcgtttcattgggtggtttattatataccatctggccggaacactatttctcgtggtatccgtccattcccttcttttactgggtcatggccatggcgatgactttcttcctagaccgggtaaaaaggaaaaacggagatgtgaccgtaaccatgtacatgctagtccggttgtgtaagttcacgctcgctttcgtctttttatggatgtacgcggcgtttgtcgggcaacaattaaagacatttggtttcacgttgatgttattctatttcatttacctcggactggagacttacattttatatctgtttgaaaagaaaagaatgaaaagagagaaaagggaaaaggatgatgagtacaatcaaagataacaaatacatatggatcgctttctggatgtggctcagctttctcactccggcaaaagcggcgtccggcgagatagacgtgcaggatatcgtcttctcccacattcaagacgcctatacatggcatatcacggaatggaacggacaagagattgcgattcccctgcctatcttggtaaaaagcgaggaaagaggatgggatttattcctgtcatcccatctacatcatggccggacgcatcacaattattatatcgccggggaaggtgagcatgcgggaaaggttgttgagaagaacagtgcaggagaagaggttcgcccgatggatttctcattgaccaagaatgtttgcggactgttcctcagttgcggcctcttgcttttcatcgttctccggaccgcccattggtataaaaagcacccgaacgaggcgccgggcggatttatcggattgatggaaatggccatctcctacatacaagacggggtgatcaaagaggcgatcggaaaagaatataagccgttctcgtcctatttgctgacggtatttttctttatcttgatcaataacctgatcgggatcataccggttttcccgggaggcgctaatattacgggaaatatagcggtaacaggcgtattggcactttgtacgtttatagcggtcaacctgttcgccacgaaagtgtattggaaagagattttttggcccaaagcgccgatctacttgaaactgcccttgccgatcatgccgttcgtggagttcttcggggtattcaccaagccgttcgcattgatgatccgtctgttcgccaacatcatggcgggccatacgattatcttggcgctaacctgtttgatattcataacggtaacgatgggagtagccgtgaatttcggtatgacgatcgtatccgtcttgttctgtgcgttcatgaactgtctggaattgttagtggcttgcttgcaagcttatattttcaccctgctgtcggccaactatatcggattggccaaggtaagggaataaatccaaagaaattaaggtattagaattatattattaaggttactaatttaaaattaaacactatgttatcgactattttattacaagcggcagccgggatgggcgtagcgaagatgggagccactataggagcgggattcgccgccataggtgcaggtatcggaatcggattgatcggtaaaggtgccgttgaagctattggacgccagccgtcggccgcaggagagatccgtacctcgatgttgattatgggagcgttggtagaaggtgtggcattgttcgctattgtcgtatgtttcttagcgttgttccaataaaaaagtaacaaactatgtctttattaacaccggattcagggcttctattctggatgatcgtttcattcgggattgtcttcgtgatcctttccaaatacggttttcccgtgatcgtcaaggcaatcgaacaacggaaagcttacattgacaattccttagagacggcacgtcaggcgaatgagcgacttgcccatattcaagccgagggcgagaagatgctagccgaggccaaggaaaagcaaaacgccgtcctgaaggaagcctttgccgaaaaggagcggatcatcgaggaggcacggaaaaaggccgtctccgaggcacatctgcagatagaggaggctacccggcgtatccgcgaagaaaaagagaaagctattcgcgaagtccgctcggagatagcggatctgtctatcgctatcgcagagaaagtaatgaaagagaaaatcggccgggataaggaacaacaacagatgatcgaccggctgctggatgaggtatcgtttagtaaatcgtaaggtatggatataggaactatttcttcccggtatgccaaagcgcttttctccctagcgaaagacaaggaacaggaaagccgggtatatgatgatatgaagatgttggcggacagcttctcgatggagccagagcttaggggcgccttgagcaacccgatcgtttccgtaccggagaaagtgaaattgcttacggcagcgggaggtatcgaggtatgcgagctatatacacgttttatcaatctggtattagcccataaacgggagacactactgcccctcatcgcatacatttatatccatttgtaccggaaagagaagaagattacccgggtacgattcgacacagccgtaacggtagacgatgcggtcaagtctcacctgcaagacaagctacggaaagagacgggatgcacgatcgagttctccggccacgtggaaccggaactaatcgggggcttccgcctacgcatcggcaattaccggatagacgctagctatgcgacgcaactacgggatatccgtaccgggctactcgaaaacagataaaaaagaagaagtatgacagaacagataaaagtgagtgaagtctcctccatcctgcgccagcaattggaaggaatccataccagcatcaagctggaggaggtcgggaccgtattgcaggtgagcgacggcgtggcccgcatctacgggttggataatgcggaggcgaacgagttgcttcaattcgataacgggatggaagcaatcgtgatgaacttggaggaagataatgtaggcgccgtccttttaggtccgaccgaccaaatcaaggagggcgacaccgtaaaacgcacgggccgtatcgcctctatcgatgtcagcgaggggatgatcgggcgtgtgatcgatccgttgggaaacccgatcgacgggaaaggcgagatccttggcgagacttgcgagatgccgcttgagcgcaaggctccgggcgtgatcttccgtcagccggtaaacgagcctttgcaaaccggtatcaaggccgtagacgctatgatccctatcgggagggggcaacgtgagttgatcatcggcgacaggcagacgggaaagacctcgatcgctatcgataccatcatcaaccaacgtagcaactacgaggcagggaacccggtttactgtatttacgtggcgatcgggcaaaagggttccacggtagcggccttggtgaacaccttgcaagagaaaggagccatggactatacgattgtcgtaagcgcgaccgcctccgacccggcagccatgcaatatttcgccccgttcgccggagcggccatcggagagtacttccgggatagcggacgacacgccttggtggtctacgacgatctgtccaaacaggcggtcgcctaccgtgaggtttccttgatccttcgccgtccttccggacgtgaggcgtacccgggtgatatcttttacctgcactcccgcctattggaacgtgccgccaagatcatcaaccagccggaggtagcccgtgagatgaacgatctccccgaaagcatgagagacaaggtgaaaggcggtggctccttgaccgctttaccgatcatcgagactcaggcgggagacgtatcggcttatatcccgaccaacgtgatctctatcaccgacggacagatattccttgagaccgatttattcaaccaagggaaccgcccagctatcaacgtcggaatctctgtttcccgtgtaggcggtaacgcgcaattaaaggcgatgaaaaaggtagcaggtaccttgaaaatcgatcaggctcagttccgtgaattggaatcattctccaagttcgggggcgagatggatgccgtcaccgctttcacgatcgataaggggcagaagaatacccagttactgatacagcctcaatatagcccgatgccggtggaagagcaaatctcgatcctttattgcggaacgcaaggtctgctgaaagaggttccattggacaaggtgcatgagttcgaggcaaggtttttgcaagagttacgtacctctcaccaacgggacgtactggatgtcttaaagaccggcgttatcaatgatgagatacgaggtatattggaaaaaacagcgaaggagttatgggttcattgaaagaaataaaagtccggatcgcctctatacggagcacgcagaagatcaccgccgccatgaaaatggtatcgtcggccaagtttcatcatgcccagacgcaaaccgagcacacacttacatatgctaataaactatccgctatcttaaacggtcttctttcggcggaatgcgacctagactcaccttacaccgaacagcgtaaggtgagcaaggtggctatcgccgtattcgcctcgagcacggggttatgcgggacattcaatgccaatatatggaaagagttatccgccacgatccagacttataagaaccagcaaatagaggtacgcctctaccctatcggcaagaaaatagcggatgagcttcataaagcgggttatagcttcgacactgatttcatcacgatcggcgaaaaaccgtcttatgaaagcgccgtatccttggcgaaccgtctcatggagctgttcgtcacaggtaaagcagaccgggtggaattactgtatcaccatttcaagaacatggcgacacaagtcgtaacccacaagacgtatcttcccctttccctctcggatacggaagcggcggaaacggccaccgactacatccttgagccctcggcggaagagttgcgtaaccggcttttcccgaaattgctgaacctaaccatctatacgatcctactcgacacctcaaccgccgagcacgccgcccgtatgatggccatgcagaccgccaacgacaacgcaaacgatttaatccaacaattaactttgcaatataataaaacccgccagcaggccatcaccaacgaattgctggatatcatgggaggagcggccgtttcatcgtaataaaaacgggatgcttccttggctaaacagacaatgatccgtatgtaaaacactttactaacggatcatttcttatttacaaaaaaaagtaagacctttgctcaccaaaacataagcctgtatacatttatattataccaatctaggatcgtacttatgatgaatcaagaaaagctaaaagggcatctccttattttagcggccaacatcctgttcgccattaatatgcccgtatccaaatatctactccccgagcatgtgcaacccgaggcgctgaccagtatgcggatgagcttcgcttgcgtgatgttctggatcacctccctattcgttccctatgagaaagtgccgttgaaggacttgggacttctatgcctttgcgccctttgcggagtaggcttgaaccaagggctgtttatctggggattgaataccacgtcgccggtagacgcttccatcatagcgaccgccgtccccatctttgtcatgatcttggcggccctgatcctaaaggaaccgatcacacggatgaaaacgttcggggtactgcttggcatatgcggggcgatctccttgatactacaatccacgcaaggttccaatcaagcgagcagtctagggggaaacctgttgattacggttagcggattcatgtactcgatctatttggtagtatccaagccactaacactcaagtactcatccgtcacgatgatgaaatggatgttcctgttctccacgctgattaccctgcctttcgctatcgaatccatctggaataccccggctttccacaaagaggtcttcgacggccaagagttgggagccatcttcttcgtgttattcggggccacgttcgtaccctatttattaataccgctggccttgaagcgaatccgcccgactaccgtcagcatgtacaattatatccaaccgatcgtagcttcctttatcgccgtattcatcggtcaggatagttttagcgtaacgaaactagtatcggccgcacttgttttctccggcgtctatttagtgacccaaagcaagagccgggcggaccttgaacaacaaaatagtcaatcttttagcaaaaacgcttgcaatatgaaaaataatgcgtaatattgcccccataatataaaagaataagtagcatacaaaatcaatgatgagtgtagagtcctcatattatacatgggcattgatgaccccttggggggttagaatctattaataagcattcgcgtagaccacgtcacgctatgtcgcaatctcgtattgcatccttttttatttctccttttacataaataagtttaatcaatcggttattgtcggttgctaatcatgaaaaagccttttcttgattgtcaatcctcgatgaaccattaaaaatacatatcgatgaaagtattaaaattcggcggaacatccgtaggttccgtgaatagtatcttaagtgtaaagaaaatagtagaggctatcgaagagcccgtaatcgtggttgtctccgccttagggggcatcaccgataaattactggccacttctaccatggcttctaaaggcgaccttgcctacgagaaagaattatcggagatcatcgcccgccatctggacgtgatcgagggagtgatagaggacaaggaggtacgcatggatgtccagaagaaagtgatggctttactggatgaattgagcaatattttcaaaggtgtttatttgattaacgatttatccgccaagacatccgatacgatcgtaagttatggcgagcgcctatcttccttgatcgtctcgaacgtgatcaaggacgctaagttattcgactcacgcaaatatatcaagacagtcaagcaattcaacaagcatatcgtggatttcgacttgaccaacaagctcataaaagagaccttctcgccgctgcccaaggtttccttggtgcccggattcatctcttccagcacggaaaccggagaggttacgaacctcggacgagggggatcggattataccgcctccatcttggcgaccgccttagacgctaacaccttggagatatggacggacgtggatggtttcatgaccgctgatccccgtgtgatcagctccgcctacgtaatcgaccggcttacttttacggaggcgatggagttgtgtaacttcggggcgaaagtaatctatccgccgacgatctatccggtttatcataagaatatcccgatccgtatcttgaataccttcaacccgaccgctcccggaacctatatctcgaaagagcgggtgaaagaggaaggcaaggccatcatcaagggtatctcctccatcaacgatacctgtttgatcacggtacaaggtttaggtatggtgggcgtgatcggcgtgaactaccggatctttaagacgctcgccaagaatggcatcagcgtatttatggtatcgcaggccagctccgagaataatacgactttcgccgtacgtaacgccgacgctgatttggccgtacaagtattgaacgacgagttcgccttggagcgtgcgcagggtgatatgaacgataccgtagcggagaaggatctggctaccgtcgctatcgtaggcgagaacatgaaacgtaccccgggtatcgccggtaagctgttcggtacgctgggacgtgcgggcatcagcgtgatcgcttgcgcccaaggcgcttccgagacgaatatctctttcgttatcaagcataaataccttcgcaaggcgttgaactccattcatgactcttttttcctatccgaatataaggtattgaaccttttcatcgccggtgtaggaaccgtaggcggcaatttattggaacagatacgcatccagcaaccgaaactgatgcggcaaaacggtttgaagctgaatgtcgtaggtatctcaaactccaagaaagcccttttatgccgggaagggatcaacctcgacaattatctggaggagctgaaggagaacggggaagagagcaacccggagcatctgtgcgaagagatcgtaaagatgaatatcttcaactccgtattcgtggattgcacggcaagcccggacgtggcggctctttacgagacgttgatgaacaataacgtgtccgtcgtggcagctaacaaagaagcggcctcctcctcctacgataattataccaagctcaaggagaccgcccgccaccgagacatcaagttcttgttcgagacgaacgtaggcgccggcctcccgatcatcaatacgatgaacgacttgatcaatagcggtgaccatatattgaaactggaggccgtactttccggtacgctgaattatatctttaatacgatcagcgccgatattcctttcagcgaggcgatccatatggcaaaggaagccggatacgccgagccggacccacgtatcgaccttagcggcaaagacgtaatccgtaagctggttatcttggcccgtgaggccggttatccggtggagcaagccgacgtaaaacggaacctgttcatcccggaaaagtacttcgagggttcccttgaggacttctggaagaatatcaaggatacagatgccggtttcgaggagaaacgccagctactggaagcggaaggcaaacgcttccgtttcgtggcgaagatggagaacggcgcttgcgaggtaggcctacaagccgtagacagccaccatccgttctatgaactggagggcagcaacaatattatcatgatctccaccgagagatatcatgaatatccaatgatcatcaagggatatggtgccggagccgacgtgacagccgcaggcgtattcgccgacatcatatccattgctaatattcgataggtatgaagcacattatcattttaggcgatggaatggccgacgagccgatagaggctctgggaggcaagaccccgatgcaatacgccaagactccttatatggataaattggcggaactgggagtaaccgggcagatgaaaaccgtagcggatggtttccatcccggtagcgaggtcgcgaacatggcggtattaggctatgacctgccctccgtatacgagggacggggtgtattggaagccgccagtataggcgtcgccctgcagcccggcgagatggcgatgcgttgtaacttaatctgcgtagaaggcgacatcttgaagaatcactcttccggccatatctccacggaggaagcggacgagttgatccaatgtctgaacgagcgattaggctccgaccgtgttaagttctatacaggtgtctcctatcgccacctattggtaatcaaaggaggcgataagcgtctggattgcacgccaccacacgacgtacccctccatcctttccggcctttaatgataaaaccggaagttccggaagcacgagagaccgccgatttattaaacgaattaatcctcaagtcccaagagatcttaaaggatcacccggtgaacctcaaacgtatggcagcggggaaagatccggcgaacagtatctggccttggtctccgggctaccgtccggccatgcgaacgatgcgggagatgtacggcttcgggaaaggctccgtgatctccgccgtcgatctcatccggggaatcggcgtttacgccggcctcgaggtgcttcacgtagagggagctaccggattatacgacacgaactacgagggaaaagcgcacgccgcccttgaggccctcaagacaaacgacttcgtctacctgcatatcgaggcaagcgacgaggccgggcatgaaggagacgtagacctaaagatcaagacgatagagtatctggacaaccgtgccgtacgtatcatctacgaggaaacgcaaaaatgggacgagccggtagcaatcgctatccttccggaccaccccactccttgctccatacgtacgcatacgaataccccggttccattcctgatttacaagccgggcgagcaacccgactccgttaccacatttgatgagttctccgtatcaaacggcaaatatggcatactggaaaaagatcaatttataaaagaatttctaaacgattagagcatgaaatattacagcacaaacaaacaagcccctgtagccagcctagaagaggccgtcgtaaaaggtctggccggcgataagggattatatatgcccgagtatatcgactccttggacgaggaggtgatagccaacatgaagaaccagtccttccacgagatcgcctgcacagtagctcagatgttcttcggggaagacatcgagccggaggtattggacggtatcgtaaaagatacgctctccttcgagaccccggtggtacccgtaaagggtaatatctatagcttagagttatttcacgggcctacattggcctttaaggatgtaggagggcgcttcatggctcgtctgctcggttatttcataaagaaagagggattgaagcaagtaaacgtattggtagctacttccggcgatacgggaagcgccgtcgccaacggattcctaggcgttccgggcattcacgtgtatgtgctttatcccaagggaaaggtcagcccgatccaagaatgccagttcacgacattaggacagaacatcacggcattggagatagacggcacgttcgacgattgccaagcgctggttaaatccgcctttatggacgaggaattaaaccgtcatatgaaactgacctcggcgaactccatcaacgtagcccgtttcttgccccaatcgttctactatttcaacgcttacgctcagctggacaagctgggaaaagcggacgagctggttgtttgcgtgccgagtggtaatttcggaaacatcaccgccggattgttcgcctattggatggggctccctatcaagcgtttcgtagcggcaaacaaccgtaacgacgtattcttggaatacctgaatacaggaacttatacaccccgcccatcagtcgccaccctagcgaacgccatggatgtaggcgatccgagtaatttcgcccgtatcatcgacctattcggcgcattcaatgatcctcataaagaaatatgcgcactgatctccggacatcgctatacggacgaggaaatcgcctctacgatgcgagccgtctataaagagacgggatatatccttgacccgcacggagcctgtggctaccaaggattacttgacagcgatctaagcgagaccgagacgggtctattcctcgagaccgcccatcccgccaaattcaaaggaacggtcgataagatattggaggcagatatcgagatcccggcgaaactgaaagccttcatggaaggaaccaagcaaagcatcgagctggcaaaagatttcgagggattcaaatctttcttgatgagccggtaaaaagaagaatagttttcgtaagtgataaggggaggtgtggcaaatatcgataatatcaatttgccacaccttccattttatatcacctaggacatacaaaacaggcgagaatttcaaaaagaaattccgtaggcaagctatcgccgattggcacaagtctaccaccaataaatagtgagctacctatattctcacgaacgagatagctcttttctttatttaactaaattataaccaagcttttcttccgaaaagtcatgttatccttaattccgcaacactattacaaatataactttttaagtacctgagcaacaaaaagttgctcaggaatttgccatgtcagatttttcacctatcttagtgttgcaaatcaaaatatgtatcaaacccgacagacatggcaaaggtagcaattaaatccgagaaactcactccttttggaggaatattttcaataatggagcaatttgactccagactctcatctgtaatcgactcaaccctcggtatgagatgcaggctgtatggttatcaatacagcgaaatcatccgttcgcttatgagcgtttatttttgtggcggctcatgcatcgaggatgtcaccactcatctgatgtaccacctttcgcttcatccgacacttcgcacatgcagtgccgacacgattcttagagccataaaggaactgacccaggataacatttcctacacatccgacactggcaagacctacgacttcaacacggcagacaagctgaatacactgctcctcaattgcctattgtccacagggcagctgaaagagggcgaggggtatgacgttgacttcgaccaccagttcatagaggctgagaagtttgatgcgaagcctacatacaagaagttccttggttatcgccctggcgtggcggttattggcaacttgattgtcggcattgagaacagcgacggcaacacaaatgtccgtttccaccagaaggacacgctgaagaggttctttgaaaggtttgaacaaaacaagcttattatcaaccgtttcagagctgattgcggctcgtgttctgaagagatagtggaagagattgctaaacactgcaagaccttctatatccgtgctaaccgatgcagttcgctctacaatgacatctttgccctcagaggttggaagaaagtggaattgggcggcattgagtttgagctggcctccattctcatcgagaaatggaaagggaaggcataccgtcttgtgattcaaagacagaagcggatagacggcgaactcgacctgtgggaaggagaatacacctaccgctgcatccttacaaatgactacgagtcttccgagaaagagattgtcgaattctataacctccgtggagggaaggaacgcatcttcgatgatatgaataacggattcggctggaacaggcttccaaaatcctttatgggagaaaacacggtgtttcttctgcttatggcactcatacgcaacttctataaattcatcatggcgaggcttgacgtgaagaggttcggactcaaagcaacaagccgcatcaagacgtttgtctttaagttcatctctgtgccagccaaatgggtcaggacatcaaggaagtatgtgctgaatatctattcatgcaacaatgcttatgccaatgtgttccagaatgactttggataacaccgacaacttatagtcgtgattttgcgtattgcctcaagtcgcatggtggggtaaggggcatttatatgtctttatggtgacattcgatgcactgtgccccctttttactaacgatgcagattcttttcgcttctgtatcatattaggcgcgtagttgcggatttgagggttattaaattcgattaattataagccaaatatataattattggagaaatagagtttttataggatcagttgataattggtggggataattattttcatctatttaaaatctctacctttgctctatggaaacgaatcaactttatacattagctcagatagtactaccaagtgcagttcttacgtatttttaatgtcgtcaacatagaaagcacatccaccgagattttcatccatcttgatgaaaagatgagtgacagtcttaatatacattaaccatctctcccccgatggttatcgggaaatggcagaggaactatagatacaagtggcccatttgtctttttgacaacttgtaatctgaagtcccggagaatcgattattccgtacccaagtgcgtctcgcttccaaattcgagagaaaaaaacagcaattctctgtttgatagctgtttgctaaaaaacggcctttcgttccagccgaaataattcaccctagttcatgttttacggccgtaaggcggtaataatgcccaacgctaccgcatgcgagggccgatgcctatatatgtgtaggcttacgccactatatgtgtagcttgacgcgactatatgtgtgggttgacactgctatatgtgtgagttgatacagccatatgtgtaggttgatacgtatatattcgttaaaaagcgacgcttatcatgttaaaaagcggaggtggcagcttgttcgcactccccgtttacgcccgttggcttttatagccagagagccgtgtcgtgaaaaagaaggtatttcaatcaaaaagatacctttcacgccaaactcgaagcacaggatctcaatccaccgcccactctttcatctcatacatatccttatattcttcccaatctggatccatctcggtataaatagagatgggcagtaattcgaaaggagccaaggcctcattcaagcgttcgccgaatacacgcacggtacgtgtgtaaaacacccagaccttctctcctcctccggtatagacacccgtcaggatagccagcttgtctttcttttccatcgccttacgaagcgcttcctccacggcctccattttctcgccaaggtcatcgctaggaaggcctctcccatctccctcgtatttccaagtgatctcgacacgttccttgaacttaccggattcggtaaactcattcaactcgtcccgcccgtaaacggtaatcatttgccctgactcgttttccgagagagccgtaaaccatacatcgcttaatctcatatttatattttctatttatctataagtattccttactgactttaccgggtaaaaatacgacaaaaaaggctgcgtccggtgaagatacagcctttttatatttctcgacggaaatttattatctctttcctaatctatgatccataatggcgtaatggcattccccataattcttcaattgatccacgatctctttagccgtagattcttcctctacttgctcgcgtacgaaccagaacaagaaatcacgggaagcatgatccttatcagcctcggcgatatcaaccaatttgtcgatcaactctgatacatagcactcgtgtttgtaaacatgctcgaatacctccaacggatttccccagcctgtcggaaccacgttgatctggccgatcgtaatatcgccgccacgatccaaggcgtaatcgatcaacttatgagcatgctccaattcctcagccgcttgtttcttcatccaatgggcgaaaccgttcaaccctgctttctggaaatacacggacattgacaaatacaaattcgaagaccacatctccgcattaacttgggcattgaacgcctctgataaatttctacttaagatcataattttatcattgtttaaaaatgttgaagtattatccgttcacgaaatttcactatgcaaatataaataaaagtaggattccttatctcatttccgcccttagatattggctactttcgaaaatttttctaacttacgcccttatttgataaacatcatgcaatacaccgacaaatatcgatctcccttgggagaaataaccctagccagcgatggcgaccacctgacaggattatggttcgacgggcaaaaatattttgccgccactttatcggcggaacaccaagaaagagaactgccgatattcgagcaagccaaagagtggctggatagctatttcatgggtaagattcccagcttcacccctcctatccatctggaggatacgcctttccgacttgcggtatgggacttattgagcaaaataccttatggcgaagtcgtaacctacaaggagctcgccggggaaatcgcccggcaaaaaggtatcccgagcatgtctacgcaagcgatcggaggagcggtaggccataacccgatcagtatcatcatcccctgccaccgtgtcgtaggcagcgatggcagcctaaccggatacgccggaggtatcgacaaaaaaaggagcctgcttacaatcgaacgggccaaaggattctaaaaccgtatcagtatgcgcacatttcgttctatcgatgaattggttcgtacgctcgaccgagagagggaactgctacgtgagatgtttcataaacggacctccctttctttcaaatacgatttcgcggtggagctgaccgattataaggaggagcgggtacagagcttaatcaatcacggagtgatacgtagtagcggcgatttcttggagatggaagacatttacctaaagttcttcgaggaggtgctgcaagtgaacgaagaggtgaatgtagcctatatacaaggacatctcagcaagctgaacgagcagatagagtattatctgaaagagaataacgagaggcggcgatataactaccataatgacgtgcgccgtacgctcaagaacatagcgctcaccacggtacgcaacgtgatcgacctgaagcggaatctggacagcacgtataagaacgagccgaactatcagataaagaaagtaaaactgcaacgactgggcgagaaactgaagaatatcatccaactcatcaacaagtgcgaaaatgcgatcgataaagatcaattgctcttcttccgcaaggcaatggatgcccagatgcgtgccacggtgagcgacgtgaagttgcaactcatcgactcctcccacaacctcatggagatacagcggcaaatcgttcattacctcaacatgatcgaataccaaaatcgaatcttcgagaaagtacgcaagctgaagtatcttaaagagcaattcctgctggaggagaatacgaatatcaagcaagtgctggctgaacgtaaccatgtgtggatggagccgcaacctagttatcgcatcaaactttcaatagattacctgcgcaattcggacgaagcgctgacacttatcaagaaactcgccactaagcttaaaaggcgtgacgataaatcgagagacgtagcggaagcaatacctaccgaatatctggaaggtaaggcggaagtgatcgatcaagtgaacttgagggaagtgtacaactcgtttgtggcttccggcgagcatcttttcgcttttgtcatgaattacgcttataagaatgcggtaagtacagaagacaagctcgtctttttctgccagatagcctctgaatatgccgaagatttgaacttttccgaccgttacgaatgtaagggacaggtagagtatcccttagttttccctaaataattcatcaaccatgaaatataccgaagaaatatacagtacattgagccatggcggatttatctcgtccaatagcctttcgcccgcagtccgtcgctactacgatgccatcgaagaggagttgaccgactattatgaatattataaaggcataggtttctatcttgaaagcggcaatggctactactttttcgcacgtaaagaaagcaaggcggatatagatcgtaaactcgaagccgccgctcgctggatagattatctctgcttcttgaaaacctacaattcagccttcggccccggtttcgtattcagcaagtcggacatagtgacacaaatacgtaccgaaatcgagctgaaggagcaagccaaggaactctttagcgacaagaaaggtttcgaggaaatcgttgataagctcatcaatgagttaaagactatgggatttatagagtatgaagacgaggacgaaggcacttggaaggtactaacggcttttcattatatagaagagttggtagattgtattaacataacagaagagggacaagatgagatacctgaataaaatagttttcctgaatagtgcgcatatcccttattccgagattcaactggacggaaacgtgcatttcattggtacgcagggtgtaggaaagagtacgctgctccgggctattcttttcttttacaacgccgataagctgaggctaggcatacccaaagagaaaagaagctacgatgagttctaccttccttatgccaactcattcatcgtctacgaggtgatgcgtgaaaacggcccttattgcgtgatggctttcaagcaacaagggcgtgtggcttatcgatttattgacgcaccctatcagtcgtcatggttcgtcaacgagcgtcgtgaggttcgtgctgattggatctctattcgcaaagccattggcacagagacgcaaatcagtcgtatcgtcgtttcttatcaagagttccgggatattattttcggcaacaatcgtcgtcccgatctcataggtttccgtaaatacgctatcgtagaaagccccaattatcagaatatcccccgaaccatacagaatgtgttcctcaactccaagctggatgccgatttcatcaaggacacgataatccgctccatgaatgaggaagaggtgaatatagaccttgatgtctaccgtaaccagacgaaagatttcgaacagaattacaatgacgttacgctttggctggacaatgaaaaacccggagggtcgccggtacaaagacaagccgggaaagtgatgcaaagctatcgcgacttattgtacatggatagccacatagccaagggacgtgccgaattatgctatgcagagaaatcagccttgaagcagcgcccattaattgacgaggaaatatccagacacaaaaccgagctggaacgtgtacatcgcttacaaagtgaggagacaaagaaataccaagagggacgggacaaattgataaaagagaaaggctcggttgatgccgacttaaaacgtgccaagcagaaacagctggagtacgagcagatgaacattaccgaaataattcgcagggtagagcagaaaagtgcggttaccgatgaattaacacgccaacagcaacggaggcaggaactcacacgtgcctacgatgatgtcatagccaaatacagcgcacttatagaacgggtagataccgactttcgagcctttgagaatgcgcaacacgcattggtgaacgaaagggaatatgcgacaaataagcagaacgagagcttgatgcagacacggcgcaatgaagagaacgaggtatatacgcgttttgaggagaaatcgcaactctcggcagacaaactccagcaactacgagaggagaaatcgcaacaaaacaatgagttgctacggatagcccacgaagctccctataaagaagaacatgccaaagccgacgaggaactgaacaaactgaatactcgtgcgcaggagttgaaaatgtccattcagcaactctctacgcaagctgtaagcctgcgtcaagaggctggaatgaagttacgggaattggagttggcacaggctcagcctctcgctaacgcacaaaaagagaagcaagagatagaggaacaaatagcccggctggagtcgctcatcgaacggcgcaaaggttcgctggccgaatggctggacaggaacaaacccgcatggaaagatacgatcggaaaaatagccgatgaagagaaaatactttatcgcaatgacttggcgccgcaggtaaccaaccaaggggaggcttccttgtatggcgtgcaaatagaccttacggcattggaacgcaatttccgtacccccgaggaattgaaagcagaactggccatataccaaggagcattgtcacagtgcgtcaagcggatcaatatgctacaccaagaattggcagagcaaacggaggctttgaagaaacaatacaacaagcgcttgcgtgagataacagaccgacagcgtctgcaagaatccgaacaacttcagcttcccgcattcatcaagaacgccatggcacaatccgcctcatggcaaaagaagacggacgattggcgtgaacagcgtatggttgaaatccggatgaaacagaacgatacggctcatcgactggcgctttgcgaggaagagataaagaagttgaaggctgatcgtgcgcatcgtcttaaggtatgcgagaaaagttacaaagagaagaagctccggctggaacaggaactgaataactaccgcaacagtatcgagacagaaataaaacttcacaagcagcaatcgctggaacgccgtaaagaactggaggcttcccaacaagcggagcttagcggaaaaggcgccgacacggcagccatcggaaaatatgacgcacgcatcctgcagattcaaaaagagctggcttacatcgagaaacatttccccgacaccatccgctatcaaaaggacaaagaggaactttttgatcgtgaaccacaacttcgcagtagaaagaagatgcttgaggatgaattggccacgcttgaagaacgtttcactttgcgtagcgagaaactgaacatacaagaaaaacatcagcaagccttattaggcaagggcatcgaaacaaagagaagcttggaggaaggtttggcacaggccgccaaatttcacgaagactccactttctgcccacccgaagtagtagtgaccgaagagaggcagacctggaagagttgcgcagagttggtgcaagagttgaaagaccatatcaccggccgcatgaaacaattggaagaattcaaacggatggttaatctgtttaaaagcaacttctcggccaagaacacgttcagtttccgcaccgatctgtctacggaggaagactatctggattttgcctccaacctctgcgagtttgtggataataataagatcctcgattttcagaaacaaatcagcgaacgctatacacacatcattcagcgcatctccaaagcggtaggcgagcttacccagaatgaaggtgagatacatcgtaccataggcaatatcaacaaggatttcgagcgccgtaactttgcgggagtgatacgcaaaatagaactccgtgcacaacccagcagcgaccgactgatgcaactcctcaaggaaataaagaaattttgcgatgagaacgaattcaatatgggtgaagtagacctcttctcgcaaatggatctgcgcgaggtcatcaacaggcaggccgtgcgctatttgctcaacctcatgaaggaattgcaaaatgaaccgtcccgtaagcggttgctgctcaccgatacgtttaaactggagttccgcatcacggagaatgacaacgatacgggatgggtagaaaagatatcaaatgtaggttcggatggaacggacatcctggtaaaggccatggtgaacattatgctcatcaatgtcttcaaagagaaagcctcacacaagtttggagagtttcgtttgcattgcatgatggatgagatcgggaaattgcaccccaccaacgtgaagggtatccttgacttcgccaacagtcgcaacattttgcttatcaactcctcacctactacctataatgtagagagctatcgctacacatatttgttgggtaaggacagtggagccaacaccaaagttacgccattattgaaatatgataattaatgttaggaaccatgattgatagagaacagaatttacgtttgggcgatgcccgtaaactgtcgcaaatgatgcaaggcgagagcgtgccctcttccgggctttccaaacagatggcagaagaactgctctccgaggatttgatttggcagcaagtctatggtagcagaagaaaattcaaactgagagacgcaaatgcgttatctatctatttagcacagcgatatgggatacaagtctcgctggatgagtggatcaaggtaatggagagtggcgaaacggtgagccgtgccagacaagtagaagttacatcacgttctaaggcgaaaagtacccgtagttttaccggattcctcgttaaaagttatcagcccattgaaacgtcgctgtatggagaaccgctgctaatcaaccctccgcagggactctctctctttatagaagatttcacgcatttccgcttggcggatgatgttacggtggtaggtatcgagaatggagaaaacttccagcatatagagcagatgaggcatttgttcaaaaatatcaaggtattatttgtctctcgttatccccagagttcggatcttcgcacatggttgcgggccatttccaatccctatcttcattttggggatttcgatcttgccggcattcacattttcctcactgaattcttcactcatctcggtcttaaggcccgcttctttataccttccgacatcgagacgcgtcttcaaacgggaaacaccctcctttacaacctacagtacgaacgttttaaagagatgaaagtaattgacgaacggctgaaaccactcgtagcgatgatccaccgctaccgtcgtatctatgagcaagaaggatatcttcaaaatagataaaagacacgcattcaaaacaagcaagcttcaatcccaaagtaagttaacttacttcatcatttaagtcaacttacttggccgcaaagttaacttactttttttcgccttgaaatcttataagttttcacctttatcaagctcttttgccatccaaaaattaataagacaaagctgattagccttgcgttttcgttccacttctactatatatctttttttcaaagaaaaggcgagcggttaggctcacttccgatgtaactcgtgtgataccagccgtaatcgcataccgctctatatcgtttaaaagtatcgtaacgatacctttactttggaagtccttgtgaacaaacatcgaatgtagatgcccaatcttctacctcagcttgcgaataatcgcacctgttcaccaccaatacggtattctgaaataaagctcgaatgcaaaggtaggaaagtttttggagtagcaaaacaaaagttactactcctcgcttacatcaccactctcctcgatggaattaatttcttgaatgagtaatgcctgaagttcgtctttgggcagcagcagttgatactcggcaaccccaatcggcttgtttatatcttgcaaagcaatctctacatccaagtggtccttgtcggcgcaaagaatgataccgattgacgggttctcattctctcctttttccaagcggtcaagcagcgaaaggtagagattcatcttgcctacatactctgccttgaaggccccgagcttcaattcaatcgcaacgagcgacctcaaacctctgtgaaaaaagagcatatccactgcatattccttattgttatactccagacgatattggtttccgataaaagaaaaacctttgcccaactccagtataaacgacttgattttagatactaatcgcttctccagttccaactccttaacaggctctgttattctaaggaatcctaagttgtacgaacttttaaatacttcattagcatagtcggcatgcgccatcggcagtacggcatcaaagttattcgttttgattttcgtctgacgggctgcgtaggtattcatctttattgcattgagcagcatatctctcgaccaacctttttgcaagcactcttctgcgtagaataaggcttcattagctgacaacgacttatccaacagtagtaaattatgtccccaaggtaaaactgccacagcttgtagcagttttgtatcttcttgataataacgctcgtataggcgtttcatattccaaaggttacgaggagacaatcccatatccggaaactgttctttcaagtccactgacaatcgtttaaccacgccactaccatatccactctctaaatttctatcaaagagtaacttcccgatattccaatatacagaattgacggtagtgtttacttgccgagcaacggtcgtgcgagcagtttgaatctcagaaaccgcctgctgcaatatttgagcgtactcgttatcatttattcttatttcttttgccatatcatgaatcttttcaatgctaatctattatattttcttcagtaacaccttctttgttatttttttcaacaaataacatcggtaacggagcaccagcatatcgggcattctcatgccttaacaccctttgggtacggtgcaaatgtccgagtgccgtgtatgcaatcttttcgtcgaatacttcagacgaaaaacactctaaccttccgataatagtgcgttcggcacggttcttttccaaaatcttcgaacacgtagcctgcaaataccacattacaatgaaaggtttacttttgtccggcataggtagtatatcaaaaagttctctgtacatcacttgcactcctttcagccgataggtttgggatatcaaacaaatctccggcaataaacaacccatccacctcgtgaactttcacttgctctcgaagccacgtcaaaaatagagtatgttcacctttacggtcatattcaaaaaacgtttgccataaatgccaatctgcggtatggattattttcatttattattatttataccattctttttttatctcatctattttgagatctttccattcctctttccataatttccaataagggatatcatttgacgatggttctgggctacaacgatctatttgaactattgaaggtagtataactgattcacctattaatatacactctccggctttgagtgtcggcattttatcaataagatttccaagtgtatccggcaacagtctctttacataattttgatcgtttggatttgttaatcgcatggctaaaaaattgttacactgagaaaatattgtttctgatatttcagaaggtctctgactagctaagagtaaagatacaccatatttacgtccctcttttgctattctttcaatggagtgtttagatgaccgatattttgccaaatcactattgggaacatatttgtgagcttcttcatacacaagtaagatagggacatcgttattaattctttcctcaccattctttgagcatcttagtcgtttataaaaataaccatattcaaatattatccttgaaatcaaagaaacggtaatacttaacacatcaaatggaaccccacttaagtctataattgtgatattggaatgttttgtttcctcataagcaattaaatgctttaaagtatcttcgaatgtaacgtcttctgtgatttcacctaaaagaaaatttaatcttttatcattaactttactttttattctagagataaatttgtcaatgcttccgtctgcgtacgtaccctttgaataattttggctctttggctcttcaaatgtatatattttcgtaaagtaatgattaattttagctgactcatcattaaaacactgatgcgcttcttttattgctatttcatttgtctttttataatccttcgtttctctagaaagatttgacaaacaagtgattacttcatttaaaataaatttcacgggtgtatcaaaagatatattttctagttctgaattatattttttcttgttttcagttatcactttttgtaacaaagaagcctgattgtaattattaaaatctcctgattctaaaaaaagctcttccaattcatccccattaagaagccaatatgggagtataagattattgatatcaataaagtttgcatctggaaatgctgatttgtattctgaatgaatatcaaatattataatatgagaattattcaaaccagaatattctcctgttttttcatgtgtagcactttgaattagtttcgctacagtatgggatttccctgaacctgttgatcctacgatggcaatatgcttattgaaaaacttattaccatttacaggaaccgaaatatctttatttgtagaaagtttagagaaagtgaacttgtcttttgcctcaagagattcttcataaattttagaaatttcttctttcttagcaggctcaacttttttaggtggaatagctattgtatctccaccacgctcaaacttgtcaccacgaatcaatcctaagggattagcttcaagaatatactttcttgttgcatttccttccttatctgctccaacttcaatggaaaagttctcaataatggcaattaacacagcattatcattgtctgcgattcttaaatatgaaccaactttaagcttttcttctgctaaacagaaatcttctaatttatctactgatatttttactttattgggaaatacagatattacttctgcattaattttttcttgttctaccataataattatattattttattgatatgaattgtttgttcaactaatatcttgatatgttcatggttcgtattttcataaaaaggtattcttgtataaaattgataaatctttcgagtcttttgtatactatctattacagaatctaaatcttccttattgtacaagattttaagttttaatccattgtaacaagtagcctttttaacaattgaattgactgaaaattcagcatctttataatcgtagccatctataaaaataaagttgtcatcatgtaaactttttaaaatatttttcaatctattctcaggtaaaccatatagatatacataagggcagaatggacttggattttttgcttctatttttgaatatttatttccaatttggattagtaaagattttatttctgtatcagaaattatcgagtcgcactctataacaaaaaaacgttcaaaaggagataaatttaaaggagaaaaatattctcttttaatcattaagcaatattctttgatgcttttttttatcaagaaccactggttgaaaaatatatccttactattgattttatcaataaattcacgttttgttattcttctttgagaaatatccggatttatcgataattcttttactattcttaatgaattattgtaataaaagtattctgcttcaaaatcattacagctaaagagtctttttagttcattaaaaatatcagtctcttgctgttcaaactctcttgctgcaatatctatctccaaatttgataaaaatgatattatttgtttatcttctatcgaaagacctttaaatgcttttagacttataaagttacttttaaaaaattctatattaataggtaatataagtttatcttgacctgatttgtaatacccataaatcttatattttataccattattagcttttgatagataatgatctaacatatatcgcaatggttgagctataacagaatgattatattctgttcctgcataatatttgcattgaatagcagtactttcatcaactgtttttaaatcaacatcctcgatgccttcaatacaaatggaatcagtttcattattgcattttagtaactgaaggataaaatagtcaaattgataataatatcctttgattgttgctattgctgaacgttcttttgccatatttaaaaggttaatttcggtaatccattcactatctccatcatctctatacttaataaaataacgctgaggagcaaatccaatatatagcggggattgtcatgttccgttgcccagtcattaggattattagtgatgccgctatctttgtgagtgatgacggcataacgctccataatccattcgatagcacttttgccatttactatgtattcataagctgtggctggtatattttcaatcgttatctggctgttgtatataattttgcttttatccgttttggagggaaagcgcatcttttcaacttgataattgattgtctccatctcgcctgattgcattactttttctatttcgctctgcggaatggtattataggtcacaatgactccggttgccgaaggacgattctcatagttcaaatgcaattccgctaagtttcttcctgctttgctaaaactccaaaaatcaagggcttcatccactaatggaatacggggcaacatctttttaaggtcggcggcaaaggcggtgcgatattccgtgctgtgcagaatgccgtaaacatagtaaaaaatatcttctttactcacatgtggaccgtaggctttgcgacaacgttctgaaatgaaatcggagatggcatcacgacgaatataattattctgaatggtgtcctcggcatcatcaaacaaagttttactctcaattttacgttcctcatagtgatacattgggaaacattgaactccagcctcaagaaaattcaagtcaacaatcgtttcagacattaagaaactgtttaaaaatgaattaaaacaattactatataattatatatcatattgaatatcagttaattaaccgatatattatttaaaacctagtggttactaaaacattaagttatggaacaatattcaaccaacctcactgataaacagtggcaatttatagaaaaaatagtgaatacgcaaaaaagaagacgaaaatattctgtggtcaaattattatatatcagctatcgatatttaattttccaattctttatttctctttttccacagctgataactgttaaaaatattttgccacagtacatagcttcccgggccaacagaagacaaggggttcaaataggtgtaagacatccagatagctaacacggtatttttttgtcccaaggcttgtccggcgctaatacggtcattgtatttcttgccgatgcgctttcccaaataaaactgcgcgatacaggttatcaagccgcctaaagcgatcaggatttctacataaatctccgcctcgctattgaccaaggatttcacggtctgcccggtcacgatagctagagcgacggcccagaggtaaaaggccatgtctcgaagccccgcaaggaagcgatggataggtggtatgaatctacgcaagaacaaagcgaggaaaaacgggaataacagcaatggaaagacttttcccaagatcttcaagaatgcggcgaagaaagtaatctcggcatgcggttccactaatgggaagaccagcggcacgacaatcgctgccaatagattcgataataaggtataagtagtcagactagaggcgcttccccctaatttacccgtaatcacggcggccgccgtagcggttgggcaaatcaggcagaccatcgctccctcgaacacatcccggtattcctctctcattggcagccagagcaataaggcggcaagcaccaaactggaaaccgcttggataagcaatagccaaccatgccaagggctgggcatcaattcccggacagagatcttacagaaggttaagagcaactgcgcaaaaatcaaaaagggcgtcagatacgctattaaagtgtacatgaacggctttgtaggctccagaaaagtaacattggcgaaaacaaaataccctatcgcacccgctaacatggagatagggagtgtccatgtcttgaagaatttcaacataacgcctattcttttaattcgggatgcaaaataacatctttccaccgaaagaggcaagagaaacggggattaattagggataaagagagacggggcatgccccgtctctacattagatattcttacagcttacttttaatgtccttatcccgtaacgagggatagagagacgcattgaactggcgcctttcttctcggtgacggttaagtcctcaaccagacggttatccaattccaccaagctcgctttcacgtcttgtccttggaaggttatcgttttaggggaggcatcgctttgggcattgaataggcggatgtaaaggtcattacctttatagaccatggagaccaactcgtaggcattattctctatccggaaaagggaaccggatgtcaaggtagcatcgccgtccaaggttgcgaccaaaggctcattgcgtcgttcgctttgtgtccaaatacggcttttctcccaagttccggcatgagggatcaaggcatacgagatctcggtcggacggtctatgatataatcccggccccacaagcctttaccggcgtattgtacgttcaaggccaatgggaaatccttaccatgcgcatagctggtcgtatgatccgtgaataatgacagaccgcaagagttatccttgctcgctacatccacccaattcaagatgatattatgcttgatgctatcccaacgattgaaaaaggtattctccaaccggctctcgcaaacatcgaacggagcatccttataaatctgttggttggcgatctggataggcagatataccagaagtttgtaacggtcgtcatagaatgacttacgaggattatccgcacggaattcgatacccggctcaccaatacgagggcttcctatccaatccagcttaacactcatatcgatgcgaggctctccctgcgttaaccggatcgtttgggtaaatgaatactttccaatcttgcctttcacagctaccttcacgaataagggcccttgctccaacacgctcacctcagccggttgatccatactggaaaggaaaccaccctcatcgataaaatatccccgaagctcattgaacccacgttcattccggttatccacgaattccttgcctcgtacggctttcgctttcaagctttctattacacctcctttagaggggtttagcaccaaggtgtataaatcactttccatgcgaaacgtaccgtctttctgtctctcagccttcaaggttccggactgtttatcctctgccttccggatcgcataagaggcataaccggcagaggggacttgcgcacgaaacaagagttttgaaacgccgtcttccgtcagccattgagccggctgtttcttccctcgcttatcaagaaccacccaatctgagtttctccatgaggcgggaacttccaccgccaccaattcattccggtcggtagccaaggtattatatacgtacaccgtggattcaccttccttttctttcaataaggacaaggcgttatcaattatctgacggctgttttgaatggtcaccccagtccaatccgtaaccgtctccgcccatgtctttttcccttgtagttgattgtaaggaacgatccagcaatcatgatgctgcgacaataaaagcgtgcgccatccctcatcgatacgttcggtcggccattccatgcctttgtataagcgagcgtaagccgccattttctccgcacgcacgatagcgttctcggctacccgtacctctccggccaaacgctgcatgacctgcgttccccacatcaagccacctaggacatcctcttgcgagaaatgccaatcatcctgagtagtcccgacggaacagtcttggatgtaattccgccaagtcttataggcggtcggcgtataatagcccgtcgtatcctgtcccagccaagggcctttatcccaaccatggctccatgaggcatcttggatacacatgccgaccgggtgctggataccggcatccaagcatttatggatgtagtcctccgtattgaaccacgagatggattgccagcaagagccgggttgtaaatcctcgcaggcgtaacgggggacggtggtaagtctcgtaccatccggccctacccaattcaccaactcacctccgtaggcgcttacgtagccaccccacatcgtattcgggttcttagtagaggcatacgagaagccgaatgacttcaatatatagggcaggcaactggtaaagcaaggctcctccgccgaataggtggtgaataccgcctcggggaaatgtttccggatcagccgtattccatattcgaattggcggatagcgctctcgccggatgtcccgaagaaataactttgggcataggtcgggtttacgtactcgatccgcccgctctccacggattgatccttaaataagcgcttgaaagcctcgtaaccttcggggtctcgttgccgtacgacttcccatgattcaggctcgatctcgatattgatattccagttgggattctgccttaatttctgggcgataaaggcggtttgtcccaccgggtaatgcccgtagataccgccatgatagccatcgatgaaataggcttgttgggcatccgcccaaccggccaacaagaattggcttaatacgaatatcgctagtttctttttcatataatatgtactattaattcacatttagaatacttccagtcggtggaagacggggcacgccccgtctctacaagtctgtaaatttcttgatctctatttgcaaggggattggtttattttgctcatagatccggtcgaccagatcctgttgctcattcacgcaatcctcacgaatccccttgtgcatgtattgtagccaaaggtcgccgttccattgcaagaagatgtcgtggggacggtatttgcgtaaagtgtccacggcagcctcgtcgcaggcccaaagcatgcccgtcttccgcatcaagttatattccacccaatagaactcgcgcatcttacgctctttcaaccagcgttcctcgttcatctggcggatcttcatcgcttgtttatactgcggggtattctgaagaagagccatattgatgcctcgctccaactccctcgccgtaaaacgaccgataaactccccaccgatcgtcaacccgtaatatccatccgacaaaccgctcacggacaatccctcataattcatctcatccataaaagggataacactcaaggcatctgcctgcgtatgtttctcattatcataataagaggtatcgataggatacggaagcgatttcgcctcgtacgtaaaagtaaggttatccgaggaaacagacaaatccgagacacggcaattatccgagcgagtcacctttttccccgctccgtctatccggatatcggctaccagcttaccggccaggccttgcgctttcaagaaaagataagccatgaccagatgtccgtccgtagagggatgtatacgatccttcccgcataaggtatacatggaatccgccgcttgctcccattggttgatcgctaccatcgggcgattgaaatccacgaatccccattgattctcccgggcacgggcattcaggaaatccacgatcttcaagatctgcgtattcttccccgggaaagcgaccttattgaaacgggaagtctcgtcataaggagaacttccgatcaagattttcctcacctccggatacttcttatagacctcctcgataagagcataatcccgacaagctttctctacccggttccgagcgatcgtatcggcccccggcttccgaaaatccatatagccgacatcgttcatgccaaaagatagcgtcaccactgtaggctcatgttcgaaaaccttatccaaccgctggtaaatcatctcggctacatccccacctactccctcgttaaagatatcgatgcgttgatccgggaaacgggtcatatagtacagccagatatatgaatgataatgaccaccgcaagtaatgctgtttcccacgaaggcgatccgatctcctttctgaaacggagctatcgactgagcatatactcttgcaagacctgataaaagcaaacagacaaacaaaacatatcttttcatctctatttctctcttctctaattttctgtgatgaataatatataccgtgttaaaaaatattactatcaatagtaatcgtatttatcatggataataatccggattactacggatagtaatatcctcccacacacctctagtctagagaatcgcccgcttacttttagcgaacgacatcctcaccgagcagagggttcagttctttctcacgcaaaggtaccgggaaaaccaaatccgattctttaaacggatacgtatgattaaccgcctgatagccgaataaatcaaccatttgcttcgataccggatcaaacgcacggtgagtacgcaacatatcataccatcctgtaaactcataacagagttcccacgcacgctctttcaatacttgatcaaccgtgatcgaagttggtctcgcctcatcaggtaacgcacggtgacgaacttggaaataagcatcaaccgccgtagcgtcagaagtagatcctccatccaaggtagcttttgcctccgcacacattaatagaacatccgcataacggtaaaccgggatattcgccccgctctttcctgtagattccgcattctcatcccaatatttgcatagataaggaacatccaaagtaatcgttgtctccggatcaccatatttgggtttagaagtatagaaaaactcctcattccgtttacgaatatcttggtcatcataactttcataaaactctttacgaggagccaaaccacccccataagccggagtaatggaaatcggttgttccggataaggcaaaaggccaaaatggaaaggagccccggcatcttgcgcctcacgctggatcataaaaatatgctcaccactattttcgttctctaacgcacgtaaatccttataatcagcgaacaagctaaaggctccactgtcaataacctccttggctttctcgtaagccaattgataatactcatttcctttttgaagcggataacctgccattgtcaaataaaccttggctaaaagggttttgatcgctcccatagagacatggcctgttttatcactccaatccaaaccggactgctccgcctttttcaagtcttccacgatctggttataaatatcttccttaggagaccttggaatcttcaccgtattcaagtctaccgtaggttccgtcttcaacgggatatccccgaataattgtaccccttgaaaatagtaatacgcccgcaagaaataagcctctcccagatacttcgctttctggctctcgctaataatatccgtagcggaaacattttgaatcacgctattacaattttccaaaggaaagaaagtagccttccagaagttacgaataatgccgttactctcttccaaaccggaaagcaacaagaactggttctgctcattaccggccgcacgaggacgataactagtacctacaagatattccaagttaaaaaggtgaactgtggcaatctcgaggtcggaactcaacagatcatcaagcccgtcataagtgccatccacagccgcctttatctggttctctgtcgtataatattcagaaggactcaagaaggttttcgggtcttcctctaaaaaattcgtacaggatgtaaaagccattgtcgccgaaagcaagccacacatccatacatgcgctttatttttcatatcttagttttttacgaagtaaagattaaacaattagaaattaacacctaaagtaaatgaatacgtacgaggtttgggataggtataaaaatccactccttgctcaaatacagcatcataactcgtcacctccggatcactaccagaatagttcgtaatcaagaacgcattctccacattgaatcccaaggataaactcttgatgtgagcggcagaaagcatacgggaactaaagtcatatttcaagccgatattacgtaaacgcaagaacgaacccggctcacaactccaagaatctacgtcattctcatatccatctcccggaaggcgcaagctaggcaccatcgtgttttggttttccggcgtccaagcgttcaccggaatgtccgcataagcattggagaatgtcacacggttacccatcaactggcgagtgaagttaatcaacttattaccatacacccattgtaaatcaaacataaacgtgaagcctttccacgagaatgtatttgtcatattcatctcgaatttaggagcgccatttccgatatagtcttggtcttcaccatccttcattccattaccatttttgtcccaatacttgatatcgccgggtttcttattatatttagcggcttcttccgcctcatcggttccccatgtacctaggcgaacatagccgtaaagggcatttaaaggatgtccctcttcaatacgtcctccccatttaccaatgatattatcatttatatccagtaccatcgatcggttcatcgtataattccaagaggtagtccataagaaatcacggctttggatattgcgtgtattcaagctcatctcaagaccttgattacggatcttacccagatttgtcatagttttctcatatcccgagttagaaggcaattgtagctcatacaataaatcagtcgtaatcttatgataataatccgccataaactcgatacgcccattaaagaaactcaaatcgatacccgcatcaagttgtctggatttctcccagcgtaaatccggatttgccatacttttcaacgtaacgatcgtcgtcatatccttgccaaaaggaaggcgtttattctcataacgtgccatagacgcataatcaccgatttccgcgttacccaccgtaccgtagctcaaacggactttcatatcatcaatcaccttttttgcgttctcgaagaaattctcattggatacacgccaagcggccgagaatgaaggaaagaaaccatattggttattcaagccaaaacgagaagaaccatcctcacggaaagaagcgcccaataagtaacgattgtcaaaattatagttgatacgggcatagtaagaattcattttattatccgtatagtctgagccaaccttagaacgtacggtgccgactcccatattattgtactcaaaataatcatcgaagaaattctcggcccctagctcgcttttctctgtttttgagtaataccaactggctcccgctacgacattcaagttatgcttattccagcttttatcaaaagtcaagtagtcctcattcgtccacgacatcgtatttcgatgtgctttctccgctttacccttttgagtatctccatagccgaataaggtactcgggttataagatgaattgatataagaaccatcctggcggctgaagctagtcgttaactttaaccaagaggtaatcttaaacgtaccaatcacgttagccaacgtgtactgattcttatcgatattcttacgttcctttaaaatcctcacgggattctccgtatcttccgcacctggataatctcctttacgggaataggtaccatcctcatattgaaccggaaggaacggtaatgcttccaatgtataccgagagatcgcattctccgagtttcgggcattactagatccaacattcaacatggcctgtaaatggaaccattctttcaaatcccatccgacattgataaatgcgtttaactgacgtttataggtctccaacattataccttgattatctttgtaacttacattcgccacagcggtcagcttatcgcttcctccagagaaactaagtgaatgctgatgagaaaaagccgtacgagtcacggcatcctgccaatccgtatcatatttcggagtcccgtccggattgaacaggtcattcttatgcgtaaacatattgctcggatccagatggggagcgatacgtcccggttgagcctcataagcacgcttgaatacatccaaagcctcttccgcatttaagacatcgactttacgagctaacgttcctgctgacagaactgtattatacgagatattcgtcgtatttttcttaccttcctttgttgttatcaccacaacgccattcgcacctctcgcaccataaatagaagaggaagtagcgtctttcaagatatcgatagactggacaatattcggatcaatctggtccggatccacgccaaccacaccatcgaccacatatagcggtgtattagaagaattcaaagaaccgataccacggatttttatcgcaggactaccacccggcgcaccagaattcaaggcgatattaacaccagccacctttccggccaatccttggaatacgttcgtggcattcggacgctccaataacttctccgagtctacggaacccactgatgttgacaagtttcgtttcaacatcgtaccatatccaacgacaacgacctcttcaagcgccttataatcctcggccaacttcacgttaaacagtgtacgattcccgacctcgatctcttgctccgcatagccgatataggaaaatgacaggatatcgttattagccgcatccaagctaaactttccatccagatccgtaaccgtaccgaccgtcgtaccctttatcacgacattggccccgataaccggtatgccatccggatccgtaacgataccggagatctttttcttttgttgctgtacggcgtctttcttcaagatcgtgatgtgcttacctgatatgcggtaggtcaagttcgtgtttttcaacaactcattcaacacgtcggtgacttggcgattcttcacctgtatatccacctgcttactattatcgatatcctcgctcttatagaaaaacatgaactcggtctgtttctcaatctccgagacgacatcatagaacgtcccgttctttacttctaccgtaacttgagctttttgcgcataggtatccgccgagacatgcaatatacccagtattaaaaaaagcaatgtgatcttcatgattgatttaatttttttaggcaatagctcatcgctattccagactttttttgtaatcttggaatatcttttttagtgccttatacaaaggactttgggagaatttcccaattttgaggtaatgacttggcaactgtgcaatctgctgcgttataccttgaattgctttcaagtaactcgtttccgtgtacaaaaataatagaatagtccgatgcacacaaggtacatcaaagaaaaagttcgactatttgtttagtttgtttaatcgcattacaattgaagtttgacttctacccattttgtttgcaatatatttgacactcttaccttcattgtgcagtttcaataaaaattggtctgcacttcttgtccatcttttattggcgttagggtgctttacatagctttcttctgacaccttttcggggtgcaagaattcatccacaaatacagacgggaaacgcttatcgtataatacaagcgtttttaccttagcccttgttattgcaacatagaataatcttctttcttctccgtatgggaattggtcgctcttagtgagcacatagttaagcacagggtcgttactcacttgtgatgggaaaccgtatgtatctttattgcattgtaagagtattacataatccgcttcaagaccttttgacttatgtacggttaaaaactctatttttcgtcctcctatcacatagtagaatctattaccctctttaattgattggtacataaaagagaggtagtaatcatcaaaagagtaacgccccaataggaatattgatttatccgatggaatagaagccacaagttgccctatcgtattgcagtaatctcgtctatcataagtatagaattccaactcggttctcatttctgagctgaacgaatggatactcttttgtatttgggctttattgcgttgtataaagttcgacgataaagaaaccaaaggctctccaaacctgtatgtagtttcaatcttgtttatctccgttgctccaaaatattcggggaattgattgaatagagccatatcacttcccgaaaaacgataaatagactgccaatcatcacccacacaatacaattttgcaggaggattaccctctcgcaatactttcaagaagttgtaacggtcaacagaaatatcttgaaactcatccactatgatataatcatattcaacagggtgtgaagtacgacatatctcagtggcttgaagaatagcatcgataaaatcaatttggttactatcgcttaacgcatttatgtagcgttcatatacaggttgaaatatattcttgatgataaacacacttcgttcatcatctgcatttttggcttgtttcaaaacctctttaactgatttacaacttgattttaccaatgtaacgaaagtaacaacaagtcgtataaacgccttttcctgcttgctgcctttgggtagtactaaatcgtataactcctcatcggtcttttcttgaattggtacacctgcttcagctaatagtttacgaagtttatccctaatatcagaataatggaaatctgcacttgatgtcactaaaagttgtgtaccaaatttctcgtgagccgcttttttccaagttatatcatcattgtatttctgattggcttcttcgtaggttatacccttgtcttttgcgaaccaagcaggaacaagtccgtgttcatcaactccgaaatgttcaagatagatgcgtttggttactccttcttgcttaaaatatattgagaagtcgggacgatattgtgagtgcatctcatctgctaattgatgttcgtatggttcttcatatctgaatttcactcccagcgaggacaaagcaaaacatattttttgttcttgttcacttctcacatatatggctctgccgtccatatcggggaacatcgcctttagctgcacattcttttgctctgataattgctctcgtctttcattcttgcgttgttcccaatcggcttcattcgtttggtaatcaatgaagtattccactatacttttcttgaaagacgatttatctaataatttgtgatatatatcaacaaacaatgaatctgtattgtcgcaaatcgatggttttgtgcctgttgttttgcctataatatcaatggctaacttatggaatgtgtaacctttcaatccattggtcgccattctttcggttagttcggctgctgctttgttcgtgtaactgattagtaatattttatgaggtgcaatgccttttacttccgtcaagtatttgacttttcccacaatagaagaggtctttccgctacctgcactactaacgaccaagcaattatcttcctctgaaacgattgaacgtctttgttgcatgtctaatggatattttagacaatggtcgaaaaaatctttatgagcgtcaagcaaaaatgtgataacgccctcattatgctgttttacaagtttattgatggctccaaaatcattgatgaatttggaaatgttttcagatggagtgattttaaaggcttcaagtttcttcaaaagagaatatgcctcttgaaaatgtgatttgtaatgatttataaaatcttgttcttgcgttgcagagattatcttgccataaaagccattgttcaagtcggtaggaatatctataaactctttctcattgagagtagataatctatcttttgcttgttcatagtttgatttctcgctatatgaagatatctgactgaacttttctgaaagtgcattgacttgtttttttaggcgtattcgtaccattgccatcacgataaccgaaatcgcaattatacaaatcatcataataaacaatggctgcatattagaagtaatatttatctgaatctttcaatccatctataatcatcccctttggtactccactgaaatttccacatatcgcctgtgttatcgtttataagatagtattgatacatacttgttagtggttgaatagagaatacacacctttcgttattttctactaattcgtttttattgataggaatacaaaataggttgtctaaatcttgtgtactatattgaacttgccatagtcgcccattatatgagtctaacaatataaatgtccacatattttgagtagcaaacatctggaatctattagtccaatttgaagatttttcaggatatgcaagagaaaacatattgataggtgcagcaaacatatagtcttcccccttgacactaaactgaacttgccaattcttacctgtatatgtatcaagcattatgaaagtccacatattctgtgtctcataaaggcgaaatctaccttctctatctcctaaaatttctcttgcactacaaatttcccaagactgaccatcatcttgaatttgttgaacttcacctgtcatcgtatttaaacgaagttgattatggtagttctgagtcttatataccttatatatttgagcatacgatgtagcagcgataaccataaaaacaagtaatgcaataagctttctcataatcaatagttccgtttattgaaaattaaatatcctctaaatccttttggatttttgtttctacattttgagtatcacgataacgaattacgaccataccctcatagacaccagaagtcttttctattgataagtctatatctccacctgttacttcccatgcactgccccacacaactgtcccttgatggacttctgccattaaagcggtattagaatctgagtgagcaggattcttttcttttgaaatagttgggttaccatatttgcgagtatataaatccttataataatcgtaagtattaacaagtgtattccattcaccacttgggtcaaataatacggctacagcaaacacacttttaccatcatcagtggctgttacgcctatagtagcattacgaccagtaaaatctcccataaacaaagcaagattgttttcactgtcaatagatgtaaatcctttgctttttaacttttgacagaattcagtcatacttccctcaatgggaattcctttaaacgtaagatgttccgaactgctttgagcatacgatgtcaaagtaattaccgtaaatacgaacgatacaataagttttctcataatctgttatattatttaaatcgtttattactaacataatccaaccaacgaagaaagcgtggcactgcaatgctacgtcttagttcggaggtcctgagaaaaccctgtgtacagatgtagtaatagcagcccacgctatagcgtgagaaccactatgctacccttgtacacaattcagaaatttctcaggtttccgttctacaagataagcataccgcttcttctttttcgtatgtcttggaaagagttacctcaatccaatacaaaagtatgaaaaatccgtgatattccttaaatcatcacggatttttttgatttacagtttcatactcctattctgtcttggtttcggtattccgatagcttctctaaactcattcattttctttctgaaccagctcacgtgtgaaaccccgtctatcttgaaatcgaatttaccgctttcatcctgtttgatggagcagacggagtgtcgggtatcaaaacttcggttaaattcggaagaatagagttcgccttttatcccgacctccttgaactcgcacagtcttctgattattccgtcattaaacttcaatcggtcacgcaggaagtttattataggcatcagcttctccacatatggaaagtagcgtctgacaaaatccgcaaactccgacagcttgcggtgctgttgctcgtaagcgtttcttatctcctgtatctgtttggcttgttgccgttcccgttgtcgggcttcgttttcaagttcaaggatgcggtcttgcaaatcctcgttcctgcgttccaacgatttcatctttccacttccgaaaagagaacccacactgcttgcaagggcggttgccgtatcggtggctgcgcttttgagcttgtcggtgcggattttcgcttttacctgtttcagttcctcctgcgcctcggctttcttctcctgtaacagtctggtttcggtttcaagggtttcatttttctttttcaagtcccgataatactgcatggtggtagtgtgccgtgcttccgagccccgtaccccacgttgcaatccgtatttcgtcatcacccttgcgtaattgtcgtggtaggcaatcagggtctggcggttgaacaggtcatcggcacacaaacggacggaatttgttttcttgcggtacttgcgcttaccgtccgtctgttctttcttggctttgcgcctttcacccgtcacgataggaacaacggctgcgtggatgtgcggagtcttctcgtccatgtgcagatgggcggcaaccacattgtctttgccgaatgtggcttgcagccattggatactgtcgttgcaccattcgtcgagctttcctttttcctgtatgttcatcatgtcctcgtgcgtacccgacaaaaccacccgaacgacacggacttggtcatgcgtgattttccgtctgatgcctgccgtgttcagcctgtgggcaatcgcttcatccctgccgtgaacgccatcagggtattcgacaagcaccctgttcagatgtgttcttgtcgggtctgcgtttttaggtattatctttctctctatatggtcggactgcgtggtgtccgatgtaccctttgccttcttaatgtccaatgaaaaatatcccatatcattactgtttttgcggttatcgttatgtttcttctctctgcctgtggcatcggctcacagggtttattatgcaaatgaaccattgcagcactcggcataatccaaacgagtttggcttctgctctcatttgcacagggtttccaaagggatttccctttggctcaatagggtgtttttagcgttacggagtaatgcgtgaagaaaacgccctattgagcctatggtatttctgtctaaataccttgggagagcggacgtgcatattacagatgaaatccccctttctttttcggtggctgcatcatccgccttgcgaattggacttgcttcttctcctttatcggctctgccgattgggacaagggcttaccgcacaggtagtcgttcaagtccttatactcacgatagtacattgacttgtcaagcaggcgttccccaaacttctctttcagtttcgtgcaggtgttccgtcctgccgtgtcgttgtcaaggaaacagccgacttgggtgtaggtctccaatatgctttccgcttttgcaagattggaaacggagttcagtatgacatagtcctgtgtgtccaatcgcgggtgttgcggattgtttcttactcggatggtaaggaatgagaggtaatccatgaacccctcgaacaggtaacacatacatcgttgtccgtcctgctgtcggatatgggtgatgtctttcggggcgacacatcccttgaagtatctgttgcgcacttcatatcctcctgccatgttcgggaagccgatggtaaaatagggtttgtcggcattcataaaccgaagctccctgcattctcttttggcaagtccgatgtttattcccctttcttgcagataggcaataagtgcaagagaggacaactcaccaacccttaatccctgataaggctgattgttggaatgctgtctgccaaaagagaacgatgcagggcggatgtatgctgtccgctcctctatgcgtttcagcagataggctacatcttccgaatagtaaagttccgctgccaatgcgaggatgtttccgcctttgccgatgccgaagtcataccatttttcaagctcagtgtttaccttgaacgatgcgtccgtttcttcccgtagcggtgatttataccacaggttcttgccttgttgctttacaggcgtatagcccagactttgcagatagtctgccagtttgatttgctttacatcttggattgtcatattacatacggttttgaagttgatgaaaatttgttgatttgatgaattgtcaatgtaatatgtttatatacagcctcgtaacctctcaacatcttctcaacaaaccactcgccaaaagagaaattcacaaacgggtgtcggtggttctcaacttctcttttggcttgttgagattttgttgagaatgtatatcgtttattgtcagtgtatttatacccatattcaacaattcaacagaaaaatgataatgttacaaggattcaagttgctcccttgtgacggtgtagaagcgtcccactctccttatcggctcataccgacactcccgattgcagttaaacaggtaggtggtataagtcagtccgtttggctcaggagtcagtttccaacattcctgcaacacttttcggacttggtgtttctccacctttacctgtgagtgtaccagcaaaagaagaatgtcactgtaacagaaagagaatgtatccgtgccgacactgtccatgatgtcaaggacaagttcgtgcatctctatctccaaccggttacggttgctgcggataatcttctgcaaggcttctgtatgcagcaatgtggggttgaaccacatccggctttccttattggtggatagctgtctgtgttgcaggaaatgaagaaaggcgggtatctccgctttcagcttttgcaggaagtcggtatcatcggactgcaagcggtctatcttgcgcacccaatagcgtgtttcccctgcgtctatgattacgggtagatactcgttgttggaacacagcacgaatttggcgaagaacgcaatctcgtcacggtctttgcctttggcttccaccttataggaaagtgtggtgctgaggttcttcaaccgctcgctatcctccctgcggttgagcagcacctcatccaccacgataagcaacttgccagcccagtcggaattgaactggctgcggaaatcctcgttggtgttgaaagtcacattgttctgaaaaagggctttcagaaagttcaggaaggtgcttttgcccgtgttgcgttcttccgacaccaacagcaggataggcaacttctgaatcggttgcaggtagagcagttgcagatagtccatccccaactcgtactgttccccgaagatgtgccgtaccaaagattggatatgcgataaatcgccctcctgcggtcggtggtctatcggttcgtagaggttaaggaacttgccgaccacggaacggtagccgatgtgttcgggtacggtgcagaagccgtcatacttgggaacgctgccgatgtaatccttgccgtaatcctgtcgcagggtctcgttgttccatgcgatgcgtttcttcacataccctccgttcagtctcggttgctccacaatcttgtagagcgttgtcccgacacggataaattcttcctttgccatgccgccatccgatggcggtctgtggctgtcctgttgttcgatagctgacataatcaaatggttttaagtttgaaaattaccagctacaaaaatataatcaattatcggataggttgttatgcaaaacacagcagaatggtgacaaatagcccccgaaacaaaaactttcgatggcttggggcaggaaacaggttctgcaaacggaaaaactcccgaaaagcgaatgtcggattacgcttttcgggagaaaaaatcagagcgtctgtcgttctgtcgtactgacttaatgaattactgacttaccgagtgaataatgtcaggcattcagctacgagcagtattcggatttggatataccattggtattcagcgagaaaaagatgcttgttttctcttttcgcaggtacagtctttcaagaacggcattgcgtacccgttccgctccgaatgtgccgatatggaaagcaagggctactatcgcttcaaggttgtaaacctccatacagcaattatcggatacccgtatgcttcgccttatcccgtattcccttaaaattccggtcttgcaaagagctttcagccctgcacggaatgtcggggcggttactccgaacaggtcgcaaagttcccattcgctcatggcggttgcgctaatgttggtcggcaaggtgatgttgccgttgccgtccgttgtgatgatgcttcgtttcatggctatgcttggttatggggttacacttccgaacgatgcgttcagcttgttgccgaacatcgtcaggtcattgtcaagtttctgtgtggttatcttcgcatagatttgagtcgtgacaatgttcgtatgtcccaaaacacggctcacgctttcaatgggcatccccttgctaagagccagtgttccaaacgtatgacgtgcacagtggtaggagatttgcttctctattccgcattccgccattacctttttcagttgtttgcacattgtccaatagttgattttcccgaaaacctgcttgtcttccgacagatacttgtaccgttcgattatctgcaagggaatatccagcagcttcacttggaacgggacatttgtcttgtgccgtttcgacaatatccatttctcaccgttcacctccactatttcgtctgttgtgagttctttcatatctacaaaagacaaggcggtgaagcaggcgaaaatgaacagatcccgcaccaatgtgagggtggggttgtcaaactcgtgcgccatgattcttttgatttcgtcctctgtcagatattcccgttccttaacattagggctgatatggaactgcgcaaacggatttctcggtatcagtccgttatagtgcgcacgcatcaccactccttttagccacatgcagttcagccagatggtggcgtttttcagtccccgttcagccgtaagataagccgcaaactccttgatgaagtcgggtgtaagttccagcatggacatatccgtccgtctgtagaatgacttgataaaggctgtgacatagttccttgcccttaccatgaccttgtatgtgccgatgctgcggtctttgccgacacgtttcaggaagttggcgcaatccttgtcaaaagcctttatcagtgtctcatactcgcttcctaccccttggtaggcattgcgcaccatttcagccgttacgtatgcctctcggtcggatatgcgctgatagtgcttgatgatttgcgccttgatgttgtccaatgccagattgatgttccgtgcttcggcgctcttgcctttggctcggttgcctttcgcatcccaaagggttttcgggatggtctgcttgcaactgaactgcgccacagtaccattgattgtcactcgtcccatgatggggacaataccgtctttctccttgctgccgttcacgtagaacagcactttgaatgtacttcttgccatactcgttttttttgtttgcaaagttaaatatcaacgagttagaccttgatacgcaaatcggtgacaaacggtgcaatagcatctctcatatgttaaatcttactctttcacgggtaatgatttgcaaaccattcttcttcttaaatccgcttttctttgcgttttccgatttttcggcttgtcatcatttgacaccgtaacgactctgatattaagtcgtttagcgtcatttctcccgtttttcgaggttattccagagattttccataagtttgtaattattttttattaatgacttaccttgctcgctactttttagaggacagcgataaaggtgattaaacgaataatgaacgtctaagaatcgggggtgagtggtgtcagtcccgattcttttttgtgatcaggtatttgtcataggcaattcgaatgtttaaggttatacatctattattttgttatttgctcctcgccgatatcaggatatcttttccgtctttcgtgaaagtgaattgtttctccgagttaataatatctagcacctcttgtataccttgatccaaggagaaggttcctgtgtagcggatgttccgcagactgtcatgcgccaagcggatatttaccccatagtaattctccagacgttttacgatagagactaaggtctcatccttgaaacgatatttccctcctacccaagcgttcgagatcgaggcatctgtctctgacaagaaaatagagccggtccggttatccgaccgggcttgttgattcggctttagcttcatactactcattttccgtccttgagcgtcaaaagattccaataggatactaccacttaataaggtggtgacgctaaaacgatcatcgttgaaagcctgtatattgaatgaggttccgagtaccgtgatttgttggttctttagttttacgatgaaaggtttcgaatgattcttcgcaacctcgaaataggcctcaccctccagatgaaccacacgctcatctccattaaaagaggtggggtatttaaaacgggtggaggcattgagtatgatcttactaccgtcggatagcaatagcgtgttcgcacgtccgcctttttccactacaatctcgttatattccgtatcgccagcatataaacgattgcttatccattgattcatacccacacctattcccatagcgattacgataatcgccgcatatctcaagaatgaaagccagaactgtttgccaaggaccttggatttcacagatacgccagagatcgcatccagctttccagccattcgctcccaactacgctccacggaataatggttcaagaacgccacttctttccgagtgtcaaaaagccccttaagctcaaagaagtgggatttattagcgtcactctcgtgaatccaagcatccaacacccgaagttcatcctcctgaatctcgttctgcaaatagcgtatgatcagttcttctatcgaattattagattccattttctgtttcatttataatatatacgaccggttccctctttttacttacgtattctaccgtattttcatctaaaaaataaaatcagtgccagaagcaccaacacattccgtatgatcttcaatcctttatagagttgcgcctctaccgtacgttgagagatatttagcattcctgcgatctccactgatttcttcccgtccacataagccaacgtaaaaacctctcggcatctgtccggtaacttggctatttcccggtaaacggagtccagacgctctttctccagctccgccgcatccaaccgattataataatctatctcctctatctttagtctacgagcaacctcatccgcataagtcttttctattgatttatgctttaggtaatcgaggcaagcattttgaacggaacggaataggtatgtcttcaagccttcttccacggaataaatctctttcttttgccagatcttgatgaatatatcatgcactaaatcttccgccgtatcgctatccacatatttcgaggcataaaagatcagtctgggggcattctccagatataataatttaaatttattcaactcatggttcttaataatatagtctttcatgctcaatgtggacatttcttgtattatattagacagttcaaggcttctcctttatctatatacgatcatagaaacagatctacttacgcccacacgaaaaaaataacacaaaaacaaaaagccctatccgaacttaatcagatagggctttcagattattctatcgctagatattatctcaacgggatatattgtacaaacgcctcgatcgcctcataagaagccaaacctaattggcgatacaactccgcggtagcacggttgcgatcttcggcacgctgccagaacaaacgctcgtcgtcacccagatacggagcgctctcggcctgcgattgatgcttcaaaatagcgttacgtttgaagcgcaactcctccggactgataggtacggccatctcaatatggtccatttcccattctgcccatgcgccgcgatacatccatacacggcagttcttcatccattcctcgtctttcacctcgtcgatagcggccagtacggcatccagacaaaccttgtgggttccgtgcgggtcagccaagtcaccggcgacaaacatttgatccggcttgatctcgagcaacagggcctttacgatatccttgtcgacctcactcaaatcattctttttcactaatccggtctcgtagaacggaagatccaagaaatgaacatgatcgtccttcacgcccgagtagcggcaaccgtgacgggcctcctcccgacggatcgttcctttcataaagaggacatccttccgctccggctcgccgttctccaccttctcgtaacgcaggtagttgatgatctcgttcgccttatccttcacggccgagtcgggagagtatttctcacatacatcacgcaaatactcgcaataacggattacctcctcgtcgcctacggcaatattaccggaagtctcgtaagccacatgcacatcatgatgctggtcgcacaaacgacgcaaggttccgcccatggagatcacgtcatcatccgggtgcggactgaatacgatcactttcttcggatacgggttagcacgctccggacgattggaatcgtcggcgttcggcttgccacccggccatccggtaatcgtatgctggatatcgttgaatatcttgatatttacgttgtaagcggaaccatataacgccaatagctcacccaatccgtgctcgctataatccttgtttgtcaatttcaagatcggtttgtccgtcaactgacacaaccaaacgatcgcacggcggatcaacttattatcccactcgcagctagtcaccaaccaaggatgactgatacgagtcaagtcataagcggcggaaagatcgatcacgaccttggcgttcggatgattctgcaaatagctggaaggaacggcatcgctaaccttgccctcaacggtcttagcgacaatgctagccttatcctcgccccaagccatcaagatcacgctgcgggcgttcatcatcgtagagatacccatcgtgatgatacctgccgggacattctcctgcgaagggaacgtacgggcagcctccttgcgagaagcgccttccaacaagaccatacgggtacgcgagctgatcgtcgttccacccacgttgaacatgatattgctggagttaccgatacctagcaacatgcaatcgatacctcccacggattggatcgtctcctcatactggcggcagaaatccaggatagcgtctttcggcatgcttccgtccgggcaatagatattcgccggatcgatatcgacctgatcgaataactcctcttttaggcgagccagatttccggcactgggattagccaatggatagaactcatattccacgaaagcgatcacgttgcgaaaacttaatttctcctctttatgcatacggatcaactccttgtaaacgcttagcggagaacgtccgccgggtaaagcgatcacgaagggcttaccgatatcttgttttttacggatttgtgttgctatctctttagcgatagcgaaagaaccttcctcggccgattcataaatgtttgtcggaatcttttccaaacgggttaaaactgaatgctcgaaagcattttccgggcgataataccgcaacggtatacgcgtcagagtaatttgagaactaaggttcgttttcatgtttaattattgatttagtattacaatcttacttgaatcacaaatatatgaaataagtactgatttcgccatacgttgatagaacaaatttattagtcgaaaggtttgatctatatcgcctaaaaataaaaaaggaccgtcccggccagccaagacagtccctctctttattattaacgtgtttagaccaatgtatttgtctccggaactaagtttcccatgctccataccgcacgcacgttcaacttacgatccaagatcacgatatccgcatccttccctctttgcaaggttccggtgcgatcgcttacccccatcaggcgggccggagtctcggaagccatacggactgcatcggccaaaggaatgtcagccttctgcaccatcgtacgtaccagtacgtccatcgtggcgatacttcccaccaatgaagaatgatccgccaacttgcatacgccatcctcaatgataatgcggggatcggataacggcttaccctcgttggctgcgcatgagagagcgtccgtaaccaagcaagtacgttccactcctttcagcttatagaccaatcggaggatcgtagagggtaaatgacgcccgtcagcaatcacctctaccgtcatatcgtccatcaagaaaacactttccaccgttccctcgtacttatattcacgacgcttatggaaaccaggcatggcgttatagaaatgagccgcatgcgtgaaaccggcattgtaagcggtcttaatatcatcaaactccgcttccgtatgcgagatagcggataggattcccctcgacttcaagtattgggcgaactcaagcgcacccggtatctccgggctggaatcccagcgcttgatgcaatccgtgcgttccaatatctctttatattctttcgggtcggcgggattctccttatcgataaacaggctcgccgccatcttcggattcagatacggtccctcgatatgcaatcccaagatagggccgtcttttttcctcatcatctcctcgcatacggccaccgccttatcgatcaccccgatttccggagccaacacggtagggaatatcgtcgtggccccatgcttctgatgggcagctaccgcaccgtggaaagcctcttccgtacattcggagaagtcgaagcccccaccgccatggatattcatcgccacgaaaccgggaacgatcgacattcctttcgcatccaccaccttggcgccaatcaccgctaaatcgctatttgtaacctccaatatcttcccgtcgctaatcaatacggaaccatccttcatccatccttgcggagtaaggatatggccatttataatttgtgtcaacataatcgttcttgtttagaatagtttattcgtaccttcaaccaacttacccatcgcccagaccgcacggacattcaagtcacggtccaacaagacgatatcggcgtctttgccccgctgcaacgttcccttgcgatcggatacgcccatgatacgggcgggagtctccgaggccatacgcacggcatcctccaaggggatctcggccttctgcaccatcgtacggatcaggcggtccatcgtggcgacactacccgccaaggccgagcggtcggccaacttacacacgccatcctcgatgatgacacggggatcgaaagcgacttggctatcactggcagcgcaagccaaggcatccgtgatcagacaagtgcgttccacaccttttatcttatagaccagacgaaggatcgtaggcggcacatggataccatcggccacgacctcgacggtcatatcatcgagcagatagatactttccaccgttccctcatacttatactcgcggcgtttatggaagcccggcatggcgttatagaaatgggtggcgtgggtataacctacctcataagcggtcaggatatcctcaaactcggcttgggtatgccctaccgaggcgagcacgcctttcgaggtgatatatttaccaaactgcatcgctcccggaagttccggagcggcatcccagcgcttgatacaatgcgtttcctccagcaaagggatatattcctcgggatcgggattcttgatgttctcagggatttgtccaccagccattttcatattgaaataatgtccttctaagtgaagccccagaaccgggctatctttctcggccatcagtttctcggtggtctcggcggcggcacggatcatcgggatggtagaagaggataaggtggggaagatactggtagtaccgtgtttcatgtgtgtggccaccgccgcacggaaagcttcctcggtgccttccataaaatcacggcctccacctccgtgcacgtgaatttccacgcctccggggacgatgtacatacctttggcgtctatcaaggttgcccccactaccgctaagtcgcagtttgtcacttctaaaatcttcccgtcgcttatcaataccgagccgtctttcagccagccttgcggggtaagaatctttccattaatgatctgtgttaacatgatatgtgttttaagctttcgcgtttctttggatagcaaagttaaggactttctttttaaaacgagtaagctattagaggttattttcaaagaataatcaaaatgacactttgtaatccgaacctccggagaatcgaatattccgggccctaagtacagctcgcctctaaatccgaaagaaaatttcagtaatcaactaatggccaacaccataccccaaaacagccttttattctagcgaaatcaattcatcctaattcatatcaaagggagagattggtatcatttatagggttacaatacggttctagcagggtaagaatgcctattcacgagtagtcataaccctattcttgagtagtcacgatgcccaacggcggcatatgcgtcggccgatggcagtactggcgtagcccaatgcggcctatcacgcatgggaaaagggatattctcccttttaaaagccagctctcgcactctctcttccgctatttcgcatcatcaacggcaagcacttgtcacgaaaacaggagtatttgaatcaaaaagatcagataagctgcctttcactggctagcagccttttcatgaatcctgcgtattcaactcttccaactccattgtccgttcggtccatagatccatcgcatcggaaagttctttttttagggcagaatattcaccgtagagagaagcgtcggaggcaccttccggcgtagccagcttcgcctcgataacggcaatgccattctcaagctccgagatacgggcctcggcctcggcaacagctttctccgctttcttaatcactttactcagttccttccttgcctcataggagagcttgttatgggatacctgagcctcaccggtaccggacatggaagtactcgtcccagtagaacgttccaattcacgcaagctatccattttcttatgctccaagaaattatagatgccgcctaaatgctcgacgactttctggttaccgaactcatagaccttatcgactaggccatccaagaactcacggtcgtgggaaaccacgatcaccgtgccgtcgaactccctcaaggcgtctttcagcacgtctttcgaacgcatatccaagtggttcgtcggctcatcgagaatcagcaggttgaccggctccaataacaagcggatcatcgccaaacgggtacgctcgccacccgacaggactttcaccttcttatcggaggcctcgccgccaaacatgaaagcacctaggatatcccgtatcttcaaacggatatccccttgggctacgtaatcgatcgtatcgaaaacggtaaggttctcgttcaatagctgcgcttggttctgggcgaagtaaccgatcttcacgttatggcctaattggagctttccggtgaaatcggtaatctctcccatgatacatttcaccaaggtagatttaccctcaccgttctttccgacaaaagcgactttatcaccccggttgatcgtaagcgtcacatgatcgaagatcagatgatcgccataacgcttcgccacctcctcgcagatcaccggataagaaccggaacggggagcgggcggaaatttcagccgcaacatggctgtatccacatcgtctacctcaatacgttccactttttccaattgtttgatgcgggattgtacctgtacggacttcgtggctttataacgaaaacgctcgataaacgcctcggtatcggccaatttcttctgttggttctcataagcgcgctgctgctgctcacggcgttcacggcgaagtacgacgtactccgaatattttaccttataatcgtagaccttacctagttcgatctccaaggtccggaaagtcgtattatcgataaaggcacggtcgtgcgacactaagatcacagcgttggcacgggtagcgataaagttctccaaccattggatggactcgatatccagatggttcgtcggctcatccagcagcaacacgtccggcctacggagtaagagcttcgccaactcgatacgcatgcgccagcctccgctgaactcagacgtcgggcggtcgaaatcgctacggctaaaacctagtccggccaatgtacgctccaactccgcatggtagttgtttcctcccatcatctggaaatgctccgatagatacgtgacacgatcaatcagcttttgatagccctcggagtcataatccgtacgctccgccaattgagtattcaagcgattgatctcctcctccatctcatggatatgctcgaaagcgcattccgcctcctcccgaaccgtacgggtatccaccaattgcatgtgctggggcaggtatccgatcgtgacctccttcggtacgctaacagttccagaagtcggcgattgcaggcctgcgaatattttcaacattgtagatttgcccgctccgttcttgcccaccaaagcgatacggtccttcttgtttaccacaaaagaaatatcatcaaaaagcgtaaaaccgccaaactccactgttagtccttcaaccgaaatcatactgtctctttaatttatgaccgcaaagatacaacagttcaaggtttactcacaaacttttcaattaatatcagcacatccttatgcaacggaagggccggatcagtataggtagccatctgtttttgctgatccatcgtatcgcaagtcttcatcagatggttcatattcccgatcaaatggtaatcggccgaaggttgggatcgcttcaatagttcggcgtcttttacggatacttgcatatccttatccccttgcaagatcaacaccgggacttttagtttcttgatgatttcctgcggattatacgtataccatgagatcatataaggctgtaccgacgagcggaacagggcttgcaaaccgatcggcacgtccggtacgagcttcccttccttcaaggacgtgtttatggatctcaccatattccggatcacttccgattgaccggccatctgttcctctatgatctcataagcgggacgccccgcacccgccaccgaaatgtatcctttcactttcggattatccaccgaagccgccataccgaccaacgctccctcgctatgccccaacacatagattccggagatccgtttgtccttgcttaaataatcgatccagcctcgtgcgtccttgatcccgtcctcgaaacgcatggaatactcatcctttccggccgaggcactcgaagcgataccccgcttatcataacgcagggaagcaatccccttccctgccagcccttccgccaaatatctcaaggaattattcttacccggcaaggcggcggagttcccgtccatatccgtaaggccggagccgggaatgatcaataccacaggataaccggactcctgattgggagttaccatcttcccttttaatgccccggtagacgtattcaacaccaccggacgctcgttcaaccgtacaggcaactggggcagaccagacaaggatacgagaagaaagcaaacgaaagctatcagtttctttttcataacggaatcaatttatatacttaaagcacacatgagacatacaatctcagtatccgccaaatgtaactaaaaaaggggaaaacctctcggccttcccccttctttatctaacatctttataggaaattaataacccggattctgtttcaagttcggattcttatccatgcttgtttgaggaatcggcaagtaacggttacgagaagagaactggcgagtctcaataacagccgtacccgtgatttccgcacgtttagtaggctcagactccccataattaatcgttcctgtaacacgtaacaaatcaccattcatgactttctcggcaagcatctttccatcttcctgccaacggacgatgtccgcacggcgcaagccttcgccggccaactctaccgtacgctcacgacggatcaattcacgaagtttatccttcgtcccatatttagccttatccacttcccccattcctacacgctggcggatctggttcaaataaccatagatctcatcagaaggaccgctcagctcattcgcggcctccgcatacgtcaatagaacctccgcataacggaatacgatcggacaagctcccgaactccaaacatctccatattgatccatcggatccaagtatttcgcccaagtcaaagcactcttggaagcattatctgtataagtcgggaagttcttgttgacagtaccatcttgaagtttctcatccaaagtattcaagacatcacctctccagtcacgtcccggatataaaatggtcatggccatacgagggtcgcgattcgcgaacggatgctttgcgtcataagtcttcgactcttctttcgtcaatccatctgacatttcatacatatccaccaaattctgggtcgggacgatagaagaccaaccttggtcaacattattatacatttgcccgatggttcccaatccgtccaacgtctcaatattctgatccgctaggattatctctttagaatccactcccgataccttaaaaagattcgtataatccggatccaactcatactgcttcaaatcaatgattgccttagctgcgtcttttgccttttgccaatcaccataatacaaagcctcacgcatcttgatagctaaaacagcacctttagcgatatagccacgagcctccggagcctccgcaatcccagctaaggcctcgtctaaatccttagctatataatcgcgtacctcttgttccgtattacgttccactttagcctcgtccgcacttgaataagaactaataataggcacaccaccataccaccaattcatcaagaaatacttataagcacggatcgctttagcttgagccacataattagcttttacagcgtcactagaaaacgtcaccttgtctacattctccaagaatgtattcgccttacgaatcgacttgtaatcataaaggatctgcccaggattagaactagacaatgacccatccccccacgggcggaatccttcccaagggaaattattatagcctatatctgagccacaatccagataaagcaacgtatttccatctagcaaatccttataacagcctactatgaagcccttcgcatccgcctctgtctgccatgtggtagaaggagccaactgatccttaggcaccgtatccagaaaatccgaacacgaagtagataacgcagccataccagccgccaacatatatattgataatcgtttcataaaatcttctatttaaatggtcttaactaattagaatgtcacatttacgccaaaagaatttgtcatcactaatgggtagctagacaaacgggaactaaccgtctccgggtctacgttcaatggcatagaatctatcgtaaacaaattctccgcagaataataaacacgtacattcgacaaaccgatagcgttcagcacactctttggaagcgtatatcccaattgcaatgtcttcagacgcaggtaactggtattaattacccagaaatcagacatcacgttagaagcctcactcggagattttctagactccgctacacgcggcatacttgcattggtattttccggtgtccagctatccagccatgcagtagaaggatgtccggcactacccgagaactcaccaaacgcttctttcgtaaacgcacggcctacattagccgcaccggtgaagttcaaagtcaagtcaaatgctttatagcctacattcaagttcaaaccaaatgtaacaactggattgatagtcttagacaatacacggtcatccgcatccagctttccatctccattcgtatctacataacgtaaatcaccggcttggaaatcctgtccgaacgggtagccgtcttttcctttataggtatccatccattgttgtgcctccgcgtcagattggaaaaagccatcagccttatatacatagtaagaatcgattggctttccaacaaaacgccacaaatcaccgtcatcaggatttgtcatacggtctacacctcctaaatcctcgatcttgttcttattataggccatatttcccatcacattcaatgaccagtcattccacttattgttataacctagctgtacctcgacacctcggttacgcatagaacccacgttgtcgaaataaggatccaagccaaactcagtcgggaccggtacctccatgatgatatccgtagtcttgcgatcatagtaatcaaacgtgaaagtcacatgattaataaccgcatccaagccaataccccaagtcgtagatttctcccatgacaaatcctcgatacgataggctttctggtaatatcccgtcgtcaagttgcctcccataggataattaccatccaaattataagtctgcatccaaggataatattggttctcccaagggttcgatttattcaaggcgtcttgattacctaacataccccaagaagcacgaatcttcaaactgctcaaccaatcatgcgtactttccataaactcctcctcgctgatacgccaagcaccggagaaagaagggaaatatccccaacgatgtcccggagcaaaacgagaggaagcatccgcacggaagtttgcctctaataaatattttcccgcaaaatcataattaatacgcccaaaataggaaagcatggcaagctctcggctcaaaccatcatttgtttgtgtagaagccccaccggcatccatatcattcaggctattactcgggaaattattcctctgcatctgattcttgctaacctcatacttctccgcatgataacctaccatcactttcaagccatgctgaccaaagttcttgctgtaattcagcaaagcatcgaaattataacgtttccaattcacgaaacgttcaaccaaggaagtggtacgagacgcagatgccggatcatccggtatgctcagaactcgctccgtatgacgttggtcctcgttcacataggcacccgtcacagtagccttcagcccatcaataatatcataatcaacagaaagtgcccccgtaaaattctggttacaattatccaccgtctgcccggaatccaaccatgcgatagggttaccatcgttagtttgtccgtatttgccatccttatccttgacagggatcatcgggctaataatattcaattgacggataatctggtcggaagaaccaccataatagctagcattcggatccgagaagtcattcttgataaaagacatgttcatccgaacagccagtttcttcgtcaactgcatatccagattcgtacgtccgttaaactgtttacgatctgagttaggaaggatacccgtctgccctaaatatccggccgaagccatatacttcacgttctccgcacctcctgtaatactaacattgtgtttatgcaacaaacctgtccgataagcctcatcattccagtccgtattaggatgtccgtaaggatcagagccatcctcaaacatccggatgtcctcgtcactataacgtcccggctcgaaacgattccacaaacgtgcgtaatcggctgagctgacacgatcaatcatggaagtagctttcgaggcacccacatatccgttataagagatacgaggagcacccgtcttaccacgttttgtcgtgatcaagataacaccattagaagccttcgaaccgtaaatagcggcggaagaagcgtctttcaatacagaaatactctcaatatcattcggatcgatatcattcatggagccactctcgataccatcgatcaagatatatgggctggcagagttcaaagtaccgacaccacggatacggatcgtactaccatcctgtcccggacggccttgacccgaggtaacggttacacccggcatcataccttgaagaccggaagacacgttggagataggacggcttgtcaactccttgctatccaattgggctaccgctcccgacaagttcgccttctgttgcgtaccataaccgacaacgatcacctcatctaatttctgggtatcttcctgcaaggatacattgatggaaggctctccattatatttgaattcttgagttagataaccgataaaggatacttggatcacatcccctttcttcacatccaacacgaaattaccattcatgtcggttacagtaccattcgtagtaccttttacaactattgacgctccggccacagggccaaaactgtcactaaccgttcccttcaaactaccttcttgctgggaaatacctaccctcggagttatcgccgcacgatcagaagcatgaaccacacctccggaacaaaacgctgcagacaatagaacaaaactgacaggtcttacaattttcaacataagaatcgttttttgtttattaaatagctgttactattataagacttaaggcatactattttagatctcgtttcttataatattcactcttctaaatcattaatgtataattataaatcctcggttaactaccatgaaagcacttcttcatcgttctggcggaacttataatcattagacgcagcaaatatagcactatttttaattataaaacaaaaaagactaattttttgcatacgaatctaaaacaacaccacctagttattaaaatatttaacaaacaatctttccaaccataatcttttttagtatggagctatggacatcaaagaggtatatggtttgaaattcaaacatgaagttagtgtatatgagtaataaacggagttccgccagaactacgtacttaatagaagcttgattaatattaaggcacttattccatttattcctttataaccactatttatcatgaaaaagttgttatcttcgtcccttgtaataactaattattaaattatgaaaaagaaaagcttaactttattactagcgactacggtggcaagtagtatcctattttcgtcctgtataggatcttttggtttaacaaacaaacttttaacgtggaatagaagcatcgacagtaagtttgttaatgagctagtgttcattgctttctggattgtcccggtttacgagatttccgctttggctgatgtccttgtgatcaactctatcgaattttggagcggaagtaatcctgtagcggatgtaggtaacgttaaaacaatcgatggtaaagacggcgtttataccgtagaaacaaaagttgatggataccatatccaaaaggaaggcgatgagaaagcggttgacttagttttcaacgaggctgaccaaagctggaatgtagaagctaacggagaaagcacaaaattattaaaattcaatggtgatgacgaagttgtcatgtatttacccgatggcaaggaaatgaatgtcgagctaaaccaagcaggtgttttagctttccaacaggtagctgacggatattcttactatgcagctaaataattgaaaattgagaattgagaattgaaaattacgtagagtcacttctaattctcaattctcaattttcaattccccagtgctaatctaaataaaatacgatgaatatgaactctatcaaaaaaatgatgctttccggagcattaggttgccttatttccggaatggcttatgcggacggttcttcaccccaacccgtaaaaccttattggcaagccattcaagtcgtagccgtaaacaaggaaaaacccagaagctccttcatgagttatgcggaccgagaaaccgccctcacctctcgatttgagaaaagcccgtactatttcctattaaacggtacttggaaatttttctttgtcgactcttacaaagatcttcctcaaaatatcacagatccttccgttaatacctcttcatgggatgatataaccgttcccggaaactgggaagtacaaggacatggcgtagccatttatacgaatcatggttacgagtttaaaccaagaaatccccaacctccgttattgccggaagcgaatccggttggcgtataccgcagagacatcgagatacccgcaagttgggataaccgggatatttatttacacatcggcggagctaaatccggcctttacgtatatttaaacgggaaagaagtgggttatagcgaggattccaaaaatcccgccgagttcctgatcaataaatacctgcaacccggaaagaatgtgcttacattaaagatattccgttggagcaccggttcttatttggaatgtcaggatttctggagaatgagcggtatcgaacgtgacgtattcctttggtctcaacccaaggccagtattcaagatttccgtgtcgtctcaaccttggacgatacgtatacgaatggaatcttcaaactggcggtagacttaaagaatcatacccaagaaacgaaaaatttaaatgtcggatatgagcttttggacgcaaaaggtaatcttgtgacctccgaggctaatgatatatgggtaagtcctgcaagtcctcaaacagtatctttcgagtatgatttaaagaacgtagccccttggagtgccgagcatccgaatctatacaaattattgatgacgataaaagaagagggtaaggtaatcgaggtagttccattcaacgttggtttccgccggttcgagatgaagcaaattgaccaagtagcggaagacggaaaaccttatacggtcttattgttcaatgggcaaccggttaagttcaagggtgtcaatattcatgagcataacccggaaaccggacattacgtaaccgaggaactcatgcgtaaggatttcgagctgatgaagcaaaacaatatcaacgctgtccgcctatgccactatccgcaagaccgtaaattctatgaactctgcgacgaatacggattgtatgtttacgatgaagcgaatatcgagtctcacggtatgtattacagcctgaaaaaaggcggcactttgggtaataatccggaatggctgatcccgcatatggaccgtacgatgaatatgtacgaacgaaacaagaattatccgagcgttactttctggtcactcggaaacgaggctggaaacggatacaacttctatcaaacttatttatatctgaaagacaaggaaataaatagcatgaatcgtccggtgaactatgaacgtgccctttgggaatggaatacggatatgtacgtacctcaatacccgagcgctgaatggctagaggaaatcgggcgtaagggtagtgatcgtccggtagctccttcggagtattcacatgcgatgggaaactcttccggcaacttatgggatcaatggaaagctatctataaatacccgaacctgcaaggcggattcatctgggactgggtggaccaaggtatcttggaaaaagataagaatggacgtgaatattatacctatggtggtgactatggagtaaacgcccctagtgacggaaacttcctttgcaacggtatagtaaacccggatcgtaccccgcatcccgctatggcagaggttaaatacgcccatcaaaatatcgggtttgaggcgatcgatttagcgaacggtttattccgcgtcacgaaccgtttttatttcacgaatctaaagaaatatatggtccactatagcgtaacagccaataataaagttgtacgctccggtaaagtctctttggacatagaaccccaagcttctaaggaatttacggttcccgtaggcaacttaaagccacaagccggtacggaatatttcgtaaacttcaacgtaacgaccgtagaaaaagagccgttaatccctatcggacacgaaatcgcttgcgatcaattccgcttaccgatcgaaagccccaagaaggcgtttaagaccagcggccctaaattaacggtttcgacaaatggagataacttatcggcatcctcctcaaaggtaaacttcgtgtttaacaggaagacaggaatcgttacttcttataaagtggatggtacggaatatttcagcgagggtttcggtatccaaccgaacttctggcgtgcgccgaccgataacgattacggaaacggtatgccaaaacgcttgcaagtctggaaggaaagcagcaagaacttcaacgtgacagacgctaccgtcactatggatggcaataacgccgtggttaacgtgaactatttattgccggcaggaaatctatacattgttaattatacgatctatccaagcggagccgtaaatgtggccgcccgtttcacatccacggatatggatgccgcccaaaccgaggtatcggaagctactcgcacggcaactttcactccgggacgtgacgccgcccgtaaagaggcttccaaattgaatgttccccgtatcggtgttcgcttccgcttaccggcaagcatgaatcaagtggaatatttcggacgaggacctgctgagaactacttggatagaaacgccggtagtatggtcggcttatataaatctacagccgaggaattatatttcccatatgtacgcccgcaggaaaacggtcatcataccgacactcgttgggtatcacttagtaccggcaagaaaggcttgttgatccaagcggataatacgattggatttaacgctttgcgtaattccatagaggatttcgatgacgaggaagcaactgggctaccccgtcaatggagtaatttcacaccagagcaagtagcgaaccatgatgaagccgcagcaaagaacgtattacgtcgccagcatcatatcaacaatatcacgcctcgcgacttcgttgaagtttgcgtcgacttgaaacaacaaggtgtagcaggttatgatagctggggttcacgtccggaaccagcttatacattacccgcaaaccgggaatacaactggggctttacccttattccgcttaaataaagaaaagccataacttatccataacaaagggagtgtattaggcttaatccaatacactccctttgtttatactactgcaacggctttgcagcactactgcaaggcgggttgcagtaacgtatccttatttaatcacttccttcaaggtattctgtaagtcttctccagtgatattcttggcgatgatcaccccattcggatccaataacacatttgccggaatacctcgtaccccataaagagcagggatctcagaatcccaatatttcaagtcggaaacgtgagcccaagtcagatgatcgtctgcaatcgctttctgccatttagccttatccttgtccaaggatatacctacgatcgtaaagttcttatccttatattgctggaaggcatttaccacgttagggttttccttgcgacacgggggacaccaagaggcccaaaaatccaataacacatattttcccctaaagtccgacaatgacacagaaactcctgcagtatccggcaaggaaaactccggagcgacttgtccgatctgtacgtgttctaattgcttgataataccgtccaagtccttcacataaggactattcgccaatgccggggaaatcttcgcacgagtcgccttcaaatcatccaaagataattggtaggtaaaataacgatatagatagaacgccgccgccggagaatccggatatttcgaaatcaaactgtcaatatcatacccttcctcaaataccttctccgcattttcttgaaagacatcattcaccggcgagttccgtacggtgatggtctccccgtcattcccgatcttgacattcatatccgtattctccaagaagagctgaaccggatagttcatattctcggttgccaaaccaaaaagtaaaggctgatctacctcacccttaaaggtgaatttcccgtcttttacctctgccgtatccacgtcaaagaacattttattacggaatgacttcaagtaaatcttgccgtcgggcatattctctacctcgccattgataacatatccttttggaacttcttggcaaccaaccaccaaaaggccggcaagcgccatcatacaaaattgcttcatttctctattctatttattgattacttaaactctgggtgatgataacgtccctttttcaacgagatcgtcccatattctatcgcacgcaccggacaacgatgaatacaggcaacgcactgaacgcaagtatcagcccattccggttttccgtcacccgacagggaaatcgtaccggtcggacagaccttcgcacagataccgcaagagatacaggtatccgtagcataaaatcggttgctgcctatcgcaaagtgagtaaataacggatagaccatatagctcttcaaaagaggggcacttcccgcacaatacaaagagggatttttcttctgccggatcgcctctacgatctcgtctacacgttccggtgcttttttcagtttttcagtctctacctccttactatccacgtcgaagccgggcattaagatataattgttcggcatttgtatagagaatcctccggttaaggtaattccccgtctcgccaaggtgctccgcatgatccgatccgtatatccacaatcatcaccacaagtacagacgaaataaacctcttgccctttatatccagacaggatcaaccgggaaataaaacgggacaccaatacagccggcccccaagaatggacaggaaacacaaaaaacactttctccctctccctcaatggataaacattctcatccttaccctcattcaacgcatcggcaatggaaaccaacggctcatcgaaagccgttcctaacgcttccgcaacccaacgggagtttcctgtccctgtaaagtagaatatcatgcgctcattttttagatgcaaaaatacataatatccaaatatatacgctatctttgtctagtttaagaaacctaaaaaacaaatcgttatgacaacgatggaattaaatttacggaaagaatatctctatgacttgataaaaggcatggatgaggaaagattatcgaaagtggagacctatataaaacgtctatgccttgccaagcaaaaggagagtctttatccttgggcaccagacgaggctgaattaacttgtaagatagctgaatctgaagtagatttcaacaatggggattattgtacgcaaaaagcgctgaagaaaaaactacaaaaaaagttggcttcatggtaaaagaaatccaatggtctaaacatgcagaagaatcatttactgaaatatcagatattcgatactaggcaatcaccggataaactgatggatttattcagataaaataacaagggatagaaatgtaagcgtcttacaatttatcccttgttacttttctgaattatagcgcaaatcaaatctcaatatcccaaatacccgtcgaacgttctaattcgaccaaggctgagctgtaattaaacagcgtctcaatatactgagcttgtacctcatcgtaagtacgctgggcgtccaagacttccaacaaagagacttcccccctattatagctgtaaatcttgccatccatcacctcacgagcttgccttaaaagcccatcctcataatgattaacttgctcggcgaaagattgataattacgatatgcctgcatcacctccgtctgtacttgcaaaagagcctgcttatattgcgcttccgcttgttgctcccgataacgagcggcacgaaccgtccccttattgaaattagagaatttcaaaggaacagcgatacctgccgtcactccggtaaaaggaggtgccggggcttcctcattataaacccgggcattacggcttacggcgatagacaaatccacatccgtattccgctcccgacgagctactttcaaggctctagcggccacttccttgttttttaaggcggctaccaaatccgtacgcccctcgcttgccgccgtgattaagtcagcaagaataaaatcccgaggctccgtacgtaactcagcctctgggtgaaataaagtatccgtactgaaagtccccgtcaagaagtttaagttcgagaaagcattctttaattccgctccggcttgcagcaactcgtttcgtaagaccccggcctctacccggctctgcgtagcatccacctcacggatttgccccaatgagaaacggatactgtcgctctccgccaatgtccggatattctcataggcattctcctttaccttatacaactcatgttgcttcaaggcttccatataagcaatcgtagcgtctgcccggagattccggaaataatcggccaacaaagcctcggtcaactcactctcgctacgtgccaatgagatattcgcaccccgttttccaaaagagaaagttttgctcagttctacttcaacaccttctcccatttgcaaggaattattctcattattgaaataagacacggaaaggttcggatcgttaaacacctttgccgccgttacctcggccttagcggccggcacattcaatttctccgacgcatactcaaggttaccttccgcaacccgctccatatattgccgatacgtaagcggaaccatggtctgggcattcgcagataagcatccgcagagtaacgacaggattatatatttcttcatatcttctaatctaaacatagtacatctttttaattccaccgccggattaagcgtgcagctctttttcctccgataccggcgtcaaatccttcccccataatgcttctcgatcatatagtataaagcgggaagcacataaagcgtgattaccgtagcaaataaaagcccgtaaacgattaccgtagccaagggacgctgcacgtccgaaccgatccccgtactgacagaggcaggaagcaatcccaagaccgcaaccgtagccgtcatcaagatcggacggaaacggtgcttggttcccgttatcaccgcatctttcaaatcccgctccctcgtacgtaagttattgatatgggaaatcatgatcacgccattttggatagcgacaccgaccaaggcgataaaaccaaccgccgaggagacattcaatgtcattccccgcacattcaacgccaacataccaccaaacaaagccaagggaacgacactcatcatcaaagccgcctgccggaatttaccgcaagccgcaaacaacaaaagcagcatcagccccaacgccaaaggaaccacagcccccaaacgggcatacgcacgatgctggttctcgaactgtccggcccatttcaaatgcacggaatcatgatcgtatttcacctctttatcgatcaacgcatttgccttattcaagaacgccgtcaagtccacgccacgtaaattaacccgtaccgtcaagtgccgcttattcatctcacgggtaatcgtactggcaccagttgtcatcttaatctccgctacttgcgaaagaggaatctttgttccggaaccggtagtcagcaatagatttccgatacgttcgggagaattgcggctagcgtcatcgaaacgacaaatcacgtcataacttttacttccgacaaatatctgggaaatagaagctccaccgatcgctaactcaatcaaatcagccacatccgacacgttcaagccatactgggcgatacgggcacgatccgcaataatctgcaattgcggcaacggaggctcttgatctaccgctacgtcggcagcacccggtatttccttcaacacattagcgacttgatctgcgatatggcgactttccgtaatatcatcgctataaatcttcagcgccaaatcactatgagccccggcgatctgatccatcaccatatcgatgatcggctgggagaaaccgaccgagtagccgggcatggtctccaacttagccgccatttcctcgatcagatccgctttcgtcttaccgaatttccatgtactatagggtttcaatcccacgccacactccacatgagagagtgagaacgcttccgccccctcatcatcgcgaccgacttgagtcattacatatgagacttccttaaactctttcaaagtcttccgaagctccgcccccatctccttcgatttctcaatggaaatacccggaggaagctgtacctgtatccagatcgccccctcatccaacggaggcaagaagtcttttcctacggtataacttaaaatccccgctcccagcaatatcgccagtaacggtacaataacccgtcttggcttctccatcaatcggacaatttgtgaatgataagccgtggaaagtttctccaaccaacgattatggtaaatctttcccggcttacgatacgcataaaaggccaatcccggaatcaagaacaaggccacacacaaagcgcccagcaaagcataccctacggtataagccatcggcgtaaacaatttcttctcaatatgctcaaaagcgaacaaaggaagataggctgttataataattaatgtagagaaaaagatcgggcgagccacctcagtcgtacggcgcaagatcgaatcttccgtcaatacctcatccggatgccgttcccttttcttcaagaccgtctccatcatcacgatcgctccgtctaccaaaataccgaagtctatagcgcctaaggaaagtaggttcgcaggaatattcgtaacatgcatcaagataaaggcaatcaatagagacaagggaatggttaaggccaccaacaaagcgccacgccaactccccaagaataagatcagtactaagacaaccaataccataccctcgaacaacgtatgcgatacggtatgcaaggtcgtattaaccaaatccgtacgatccataaacggatggatacgggttccctcgggaagtgtctcgttatttagttcgtctaccgccttatgcacatcatccaacacccgggacggattctcccccctgagcatttgtacgataccttccacgccatcggagtaatcacgggtatcgtccgtaaaacctaaaacgcccttacgctccaagtttccgtatttcagtttaccgatatcattcaagtagaccgggacaccattcactgtcttgatcacgatatgccccaagtcttccaagtccttaaccagaccgattccacggatcacataactcaaatccccccggcttaacatactaccaccggcgttcacgttattcttctctatcttttccgtaatatcccctaaggtaatgtcgtattgctccatcttataagggttcacctcgatctgatattgggtagtgataccgccgtaattacttacatccgctacacccgtaacctgtttcagtctcggaataattacccatttatgcaaatcggtcaactccctcaagtctaaacggtcactttccaccacataacgaaagatctctcccgtcggcgaagtcaaaggatttaagccgggaaccgcattataaggaagctccacgtctaccaaccgctcttgtacacgttgccgggcccaataatcctcaataccatcatcaaaaaccaatacgaccgtagataaaccaaacgtattcttgctacgcattacgtttaatcccggcagaccattcatagcccgctcgatcggaatactgatttgttgctcgatctcctcggcggccaatccgggaacctgcgtcacgacttgcacggtggtatcggcgatatccggataagcatctatcgccaaccgcgtccaagaataataaccaacgatcgctaagaacagaaataacacgaacatcagtcctcgccgatgtatcgccaagtaaataatccttttcataatccgttagcgtgcgtcaagtaaataaaacgctcccgtaactacgatctcgtcacctacgttcaagccggataaaaccaccgtcttgccatcttcagtatggccggtctcgatcttttgtttccggtaatcgttattccccaattccaccaatacgtacatgttctcctcttcctgcaagatagcggaagtaggtatacggatcacctccgcctcacggtcgctcagcttgaccgtgccgtacatctccggcttcatcaaacgggtactgttatcgcactcgatcaagacctccaccgaacgggtatcggggtccagcatctcgctgatgtgataaatctttcccgatatcggtttatccggcatggctaccaaccggatttccacctcatccaaagcctgtattaaactcaaatccttctcttttacatgggcgaccacccataccttgctcaaatcggcgatgacagctacaggctcggcgtcctctttcatatattgcccgattacgatccgatctttcacgacctcaccggctataggcgagcgaacgatcaatggttgccccaaagccatttcatccggattaatctgaaagactttcaatgcggctaccatattctcatagtcttttttctttaactcgtaattcacctcggcctcttccaattccttttggacaccaaccttgtttttcatcaagtctttctcccgattcaagcttttcaaagccagttccatctcttggcgagcttggtaataagatttccccgcctcataaacagcgggagcgctaatctcgaagatcggactacccggggccactttctgccctaagcgaacgaacgatttcgtaattcgcccgcttaccggtgaagccacctctgcgtaattagaaggaatcgcctgtacgacccccgaggtggtaaactccatacggtaaggttcccgtttaaccgtttcctttgtcaacttggataaaacaggagattcggaaccgatatgtataatatcccctttgagtgttacggcatgcgcagactcatcctcttgcttttgggtatggcaagagcatagtactatcgctggaagcaatagtaaaaatatagatttcatataagatgcgtaaaatgtttagtataaaaagtgattctaatgcttgattcaaactactataccaaacgagggaggcgcacgggattcgccacgccgcacaagacgcaagacaacctctttctttagaaagacgagcactaccatcaaaagcgcccaagccataaccaaaggtaagtacggaattaactccagacacaattcggtcagctcttcaatcgtattaaacgctaccgtactatgctcatgatgaggcaagccgtcggctcccggcagatagggatgagagtgagtgatactagagtttaggaaatgatgcgtatgggtaaaggccgtgccacccacgtagtaactcataaagagtactaccaagaggggtcttaaccacttcaagctacgcattgttttcattcgccatctgtttacttcgcaaagttataaaagaaactgccatttcatttgcaataagtcaaaatttattcctttatttgcatacactgaataataaacagtcatatcaatgaaataaacactactttatgagaaaaatcttacttgtttgtgcggcattagcctgcatgacagtctcccctgtaccagctcaggacgctgccgtaaaaaaaatcatcgagatgggtcagaacgataatcaagtgatgcatcagctggatatccttacgaaccgctttggcggacgtttaatcggttccgacgcttatgagaacgccgccgagtggatggtgcgtgagtttaagagttggggactcgatgtccaattagaagaggccggtaccgtccctgtcggctttaatcgaggaccttggttcggacgcttgttgagcgacaacggaatgatcctgcatttcgccaccccttcctacacttccggaacgaaaggcgtgcaacgtgggcatgcggtgatggagcctcgtaacgacgaggagttccagcaaatcaaaggaagattgaatggtgcttgggttcttatctcagggaaaaatgtaggttggcctatcgaccgctccgcctcgggagattccatccgtgcggagatcaagaaagagaacaacgagatcatgaagaaaaacaatgatctaagacgccgcaactgggaaaacggggagaaaaacgagatgttgccttataaagaattccccggattatattataaggaaatgtgcgaggccggagctttaggttttatccaatcctccaccgtacctatccgtgcgttatacgaccggaaaatgatgaacgacccgaatacgaacttcgacaatctgccggaacttccggatatcaaattagacgagcatcaattcgcgatcatcgaacaaatggtgaaagagagacgtacattcgaactagagttcgatattcgtaatcattttaaattaggcccggttaaataccataatgtcgtagcgtctatcaaaggcagcaaatacccggacgaatatgtaattatcagcggtcacctagatgctttcgacgtggctaccggaggcatcgattgcggtactggaatcggaccgatgatggaagccgctcgcatgatcgccaaatccggagccaagcctaagcgcacgatcttatttatcggattcgccggtgaggaatttggcttattaggagcacaagcttgggtgaaagcgcataaggataaattacccaaaatcgctaatttgttcaatcgtgacggtggcccggaacctcctgtcggtatctccgtccctcaagccatgtatgatgatttcgtgaagatcagcgaacccatccaaaaaatccgtccggactatcctttcgaggtaaaagttcgtgaaccccgtaaacgcccgacacgcatggggggaacagacgcatcagttttcgccatcgaaggtgtccccacattaggtttcaccacagaggatttcaaaggatatgattttgattacggcgaaatctggcatacggaacgggatttatacacaaagaacatccccgaataccaagaacatacggctacggttaccgctatcatagccctcggtgtagcgaatctggataagcaattatcaagagaaggtttatataccgaagagtaggtcagcacgatcgctattataaggagtttacaatgcctattgtaagctccttatgatgggcatcataaaagacttacaatgcccattataagaaatagaaaaaggatatgccctaatagacatatccttttctcattctagggtgaaagatggggctcgaacccacgaccctcggaaccacaatccgatgctctaaccaactgagctactctcaccatataaaaaaacctttcattcttcacagacgccttggttcataaaaccttgttttattcataacaagatttttatctaaaaaaccacaatgggtgaaagatggggctcgaacccacgaccctcggaaccacaatccgatgctctaaccaactgagctactctcaccatatccgcctttcaaaggattccccctttaagacggcgcaaagataggtataaattctgattacacaaaccttttgcgaacttttttatccatccacttacttatagatcgctttctttcccgctaacaatgtgttacgcatcaaagaaatgattgtcataggccctacgccacccggaaccggagtgatataggaacatttaggagcgacctcgttaaacaagacatctcccgttaacttaaatccgctcttggttatgctgcttggcatacgggttgttcccacgtcaacgatcacggcgccttccttcaccatatcccctttcaagaattcaggaacacctaaagccacgataataatatcagcagacaagcacatctccttcaagttcttagaacggctatggcatacggtcaccgtacaatcgcccggataagatttctgcatcatcaaggtagccatcggcttgccgacaatattgctgcgtcccaaaaccacgcaatgctttccttgcgtctcgatatgataacgcttcaataattccaagataccggcaggcgtagccgatacgaaacaaggcaaaccgatagacatacgtcccacgttaatcggatggaaaccgtccacgtctttacgataatcgatcgcctcaatcaccttctgctcggatatatgtttcggaagcggaagctgtacgataaagccatccacatccggatcattatttaactcatcgaccttacgaagcaattcttcctccgtaacatcctcctcaaagcgaattaaggtagacttaaaaccaatctcctgacaagtcttgactttactagccacataagtctcgctaccaccgtcatggcccaccaaaatagcagccaagtgagggatcttacctccggcagccttgatctgggctacctcctcagccatctccttcttcatctgagcggaaacggccttaccatccagcaattgataatgttgttcttccatattattgattgtctcctgttaattaacgtctgaacgagggcttcatcgaaggtagcttcatcttccccgacttcgcggaagtaagcatacgcatcatcttacgggtctcatcaaattgcttgatcagcttgtttacctcctggatgctcgtaccgctacctttggcgatacgctgacggcgtgagccattcaagatagccgggttgctgcgctcatccggagtcatcgaataaatgatagcctcgatactcttgaacgcgttatcatcgatatccacatctttcaatgcctttcctacacccgggatcatggatgccaactctttcaagttacccatcttcttgatctgttggatctgggagataaagtcgttaaaatcgaactggttcttagcgatcttcttctgcaaacgtttcgcttcttcctcgtcatattgctcttgcgcacgttccaccaaagacacgatatcacccatgcctaagattcgatccgccatacgttcagggtggaaaatatccaaggcatccatcttctcgcccgtaccgacaaacttaatcggcttatcaacaaccgtacggatcgacaaagcggcaccaccacgggtatcaccatccaacttcgtaagtacgacgccgtcgaagttcagccgctcattaaattccctcgcggtattcacggcatcctgacccgtcatggcatctaccacgaacaaggtctcatccggctggatagcgctcttgatagcggcgatctcgttcatcatctgctcatcgatagccaaacgaccggcggtatccacgatcacgacgtcattgcctttagcccgtgcctcgcggatagcgttcatagcgatctccaccggattcttattctccaattccatgtataccggaacacctacctgctctccgactacacgcaactgctcgatagctgccggacgatacacgtcgcaagcggctaataatggtttcttatttttcttggtctttaataaagacgctagtttaccagtgaaagtagtcttacccgaaccttgcaaaccggacatcaatataatggcgggatttccctgcaaattcacgtcgactgccgtacctcccatcaagctggccaactcatcgtgaacaatcttaaccatcaactgactaggcttaaccgatgtaagcacgttctgtcctaaagccttctcttttaccgtatccgtaaaactcttggcaaccttataattgacgtcggcatccaacaacgctttacgcacatccttcaatgtttccgccacattgatctcggtaatcttgccttcgcccttcaacagtttaaacgatctgtctaacctttcgcttaagttctcaaacataattcgtatgtgtatttatattattttctactggattaaggggcaaaggtacgaaaaagagatgagtatgcgatgaaagcgatctcgaaattcttcacttctcaacgttttagtatacggaccgaattaagaaccgccagcagagacacgcctacatccgcgaaaacagcttcccaaagcgtggcaaaaccgaaggctcccgccacaaggactatcaccttcacgccaatagatcccacgatattctgacggacgatattccgggtagcacgtccgatagaaatagcttccgctactttagagggctggtccgtttggataaccacgtccgcgctctcgatggccgcatccgatcccaatccacccatcgcaataccgacatcacttaaagccagtaccggcgcatcgttcatcccatcgcccacaaaggcaaccgacttatccgtctccgccgttaatcgctctatataagcggctttatcctccggcagcagattaccatacgctttatcgacacccaaacgctcagcgaattgattcacgatctcttgcttatccccggacaacaagcgaatatctttaacatccagatcctttaaccgacgaatcgcatccacggcatccttcttcaaggtatccgaaaggagaagatgccccgcatatttcccatcgatcgcacaaaccaccacggtagaaacactatcggataattccttcgggacaggaatatcacgttcggccaataaacgaatgttaccgacaagcacctgccgaccgttcacgatagcctcgacaccatgccctgccaattcccgcatgtcagtgatttccatcggcacgctatcttgtttttccgcatagcgaactacagcctgcgctaccggatgggtacttttccgctctactgataacaaaatactcaaaagatcagaaaccgggatctccgtgctttccaccgttgtgacctcaaaacgcccggtagtcaatgtaccggtcttatcgaacgctaccgtatttacccgtgtgatcgcatctaaataattaccgcccttaaataatatcccggcacgagaagcggcgcctataccaccgaaatacccgagcggaacacttataaccaaggcacaaggacaagaaataaccaagaaaaccaatcccctatataaccaatccgagaaaacatactggaaagaaggcgtcaccatccctaccaaagcaggaaccgacacgattagaaacgacagaagaatcacgattggggtataaatccgtgcgaaacgccgaataaacaattccgccggcgctttccgctccgaggcatctttcaccaaagccaaaatacgggccaaggcactttgctcgtacggccgattcacttgtatacgtaccgcctgcccctgcacgatcattccggcaagcacctcctcaccctcacggatagaacgaggcatactttccccggttaatgccgaggtatcgaactgtgcctcggcttccaataaaacgccatccaaaggcacacgtccgccgggtttcacctcgatccgctcgcctacttttacatccttcggagatacattcatatatgtacccgtccgccatacatccgttcgttccggccggacatctaacaagtcactgatattcttcgaggctttattcacggctagaagttgcaacctctctcctaccgtatagaaaagcatcacggctacggcctcgggatactccccaatacaaaacgccccaatcgaggcgatcgccattaacgagaactcactaaaaaagtctttccgcaaagccgcttcccaagcttctcgcataacaggaagtcctaccggcaaaaaagcgaccagaaaccaaatggcctctatccaagactcagcaaaccaacttatccccgagtacttcccgataagtcctatcaccaacaaaacgaaagaaaccgtcggcatccataaaccggaacttccgtgcgaatggcaatgttcgcatccacatgttgtactcataatcttatctattttaattatttacttcttgattacggtacaaaggtaagagaagggagttgcaacttgattgcaaattatcagggtttctgggaacgtcgcttattacacaatgggcaaacaccctttaccgtataattaatggtatccattatatatccttccggcaattgagcgaccgggatcttgatattattcaaacaagaggttttacggcatacctcgcagaaaaaatgaatatgcctatcacccactgggcatgtctccgaacggctctggcatatctcatattttatagagccactaccatcttcgaaagaatggatcgcatgatgttccaataacaaggccaatgaacgggaaatggtcgatttatccaacgtctccaactccgcctccaattcgaacagggaagccgggctggttcgttctgataatttttgcaagacaaggatccgtgcggcagtaggccgtactccttttcctaccaacatatcttcacattgcttcgtggacatgagttacctttcttatttgattacaatacaaaaatacgaacaatttcccaatattcacagttcaaaaaaagacgtacgtgttttttcccctcatatacttatattcttttattttgccaagaggctttctttaaatagattacgctagcgacgagcaatccactatagtaaatagcctctgtcaagaagcatacggctaccggcaaacgtaaacgcatccccgcgacatatacaaaaagcacatacagaatcaataccgccgcttccataaaaagcgcagaacgtgtatttcccgtacccgacaccccgttgaacgccacattagctaccgatccgatcaataaagaaccgacaatcacgtagacggatggaaccgaggccgccactaatgaagcgtcattcgtataaacagacacgacccatcccggcatcaaactgacaatagcggcaaacacgaccataatgcccaacgataacttacagatattccagatagtcggtataacttgattgatcgctcccgcctcgatactattactcacgaacgtgtttgtcgtggtcgccaaggaattaacgggaatcaacatcacgacgtaaatactacgtacgatattcgccaccgccaactcccgttgccccaaatgctccacagcgataaagaacataaaccaagtagcgatagacaagaaatattgcagcatcgtgaacacggaaatatccagcacccgtttcaacaagccaaaatcgaaagaacgaatctggttaagcgcatatttacgtatatctacggtaagtctcgtgtaaaccacgaaaaagagaatcgataccgcctcggctatgacggaagcgatagccgccccttgaatacccatctttgggaatccggcatgtccgaaaatcaaaagataatccagtaagacattcgtcattgccatcaagacagcgttcaatgtcaacacctttgtacgggtaataccaataaaaagagcccggaacatcacgttcacgaaagagaagaagaagccaaacacacgccaatccaaaaattcctccgtggcattcaagatagcgtccgaagaaatcaatacacgcatcacgtctcccgcgaaaaaacgagaaaacaagaacaatatagcagccagcgacaataggaagaaaacgccttgtatcatgacaggccctatctggtcataacgtccctctccgtttctacggccaatcacgatttgagatcccgtactaaaaccgaaggcgatcgtaaaagcgcagatataataaagtcctcccatagcggaagcccccaactcgacttcaccaaccctacctagaaaagccgtatcagtcacgtttatcacgttttgcgccaacaagctcaaaaagatcgggtagctaacattccatatattcctgttcgtgtacataactcgcttattacttaaatttatgaagataaaaaaagcccgccgcatcccgacgagcttttcttatgattagagatctctacaaagcctagcgtctgctatatcaacttatttgtcgccgtatcgggaaataccacggaaggcttgaatgttttcgcctcctcgaaatccatcatggcatacgacataacgataataatatctccgggttgagccttacgggcagccgctccgttcaagcaaaccactcccgagccacgttcgcccttgataatatacgtctcaaaacgttctccgttattattattcacgatcgagaccttctcgttcgcgatcaaattagcggcgtccaacaaatcctcgtcgatagtgatgctaccgatatagtttaagttagcttccgttaccgttacccggtgaatttttgactttactacctctataaacatgtatgacttataattagtatttgatattgtcgatcaaacgtacctctccgcaatataccgtgatgcaacctaccggataatcggtatccgaccagttcttgatagactctaacgtattgccatctacgatctcgtagtactcaacttccatgactggatcgctattaatcgtattgacaacatagtcaatcacttcttgtacgctttttccgggcacaaaggtagtactttcttttaacgtacgagcaattaacggagctttttgacgttgttccggtgtcaaacgggtattccggctactcaaggccaagccatcgccctcacgaacgatcggacaagcattgatcgttacagggatattcaattgtttcaccatcgcccggatcacagcgatctgctggaaatccttttccccgaaataagcgttatccggctctacgatatagaacaacttacttactacctgcgctacaccgttaaaatgccccggacgcttagcgccttccattacctcagataccgttcccaaatcaaatgtacgggtatctggctccggatacatctcttctacagagggagcgaatacatagtcacagccggcagattctaataacacacaatcagcctccaacgtacggggatacgtttccaagtcgtgtttgtcattaaattgggttggatttacaaaaacactgactacacatacatcattgtttttcacgcaatgttgtactaagctaagatgtccattatgcagtgctcccatggtaggaacaaagccaattttcttattatcctgctttgcctcagcaagataagccttcaaatctttaatactatttactattttcatcagatagatgcttaattgacggtgcaaagcaactaaataattaccgtaaataaaagattttttgtatatttatatctatatatgaatatcaacctattacaaaaacagttcgttcatgctgttcttttttagcttcttctgatattgcaaatatagtgacttttttaatatccaaatctaaatatctaaaaaacagagtttcttatttccttcatacaacaacccccagctaccactaggataactggggtttactcattttgtaattacctacacttacttaaaccaaattttggcattcttctttacttctacctttgtaaatttctttaactcttcagccaacgcttgcacttcttctggtgttggttctggaatacaaacctttccatttgtattctttcctatattaacttgctcagggttacacctctttatacactctatcatttcattcaaatcaaactccattaacggttctgtcgttacatacgttttaattcctctggcagaaatatcagccattgcctttactcgatcttctatcaagggagaattacgcataatttcaggatagcttctattggtctcaatggttgtacagactacagatcttttaaacacagggtgatccaaatactccaatatcctagctggattcttactttgaaacaaatatctattatattcgtcgcagtaatccaatacggttttaatccaactatctggtatatcctgagcaaacatatcaatgctactgcctacaaagataaaattaccactgcccaaacaagcatttactaattccccagcatccaatctggcttctctccgtttgggagacaatttatccatataacaatagctacaaccgtgatagcactttcccttaatgggattccaagtatggctcacaaactcatacatatttccttttgcttctcttatcatattcaaaattttaagcggaaggtgttgttacgcaccttccatttgttaattactctgctgattccactgatactttaaagctatcccaaagttcattcaattttttgttaattagatcttctttactaccctctccaattttacctttaactttttgaagatatgtaatatcttctggagctatcgagcgcataaactctatcatattatccgtaaactttgctttatccgcatcaagcgtattatcatatttacttacaatccaaccagataatgttgttctgcttttacacaatttctctccaaatgttgctttagcgacttctaatatattcaatcccctctccagtcctgcttcattttttaacggatctaagtattttccttgcatagctgcatccatgaccttcgtatctacctttttattaaaggtgaaccaaagagatgctgcattcaaagaataaccttgtcccattaatttattgatttccaataataatttaggacaatccttattaatagccgttgccccctttacaatatcacgagttttccacttgttagtacaaacattgatctctgccaacattttcatagtaggcacattatcgcccaaagaatatattacaaaaaactcctttttatatttctgttcctcttccaattttgcattagcttccaacaattccaaatgagctttatatctatggtttccttcaaccaatacgatatactgacttgcatcctctttggaaatatcctcacccgtttcaaaatccattatttctaagtcttcttctatagacttacttccatctataataatagcaggagataacaacccaaactgtttcaaagactcttttttcttcttgacgattttaggatcaagttctctgtttgctactaatcttgcaatttttttaccttttttcagcaagtccgaaatattaatcaaatcattcatatattaattatttttattgccaaccttcattgattgacactgcaaagatgaagcaataaaacgcataaacaatagaaattcaacacattacagggtagcacaaaaatagcagagtttaacaaccctgctataaatcaatttgttacgttttaatagagaattaggcgtaccaattgcctatacctttaaattctggttttttctttgggttcatcaatcctttcaatgtattatattcgttaagtattggagtaagcaggtttctatttctacttatccctgcaaagtaaagcagataagaaagcaattctttttccttgttggagatattagcaccttccgcccttttttcctttacatggtttgaactatcaaaatagcacctgagcatcttgcaaaacaaatatgccattgctgtatcactatattctacggattcttccaacatgatacgatcaccaaagataaaagcatctttcacttttggataggcttctttgcatagaaaaccaatcagatctatcgtctgactgtctgttaggataaacttatttttacctatctttaaagtcagttcagcaggctgttcttttctttcttctatcgtctgtataaatttctgaatttgcttacttgtgccttcttctgttctgatattgtctatgcaggtatcaacacagtaatcataaacgaacagaagaagataccaaaacattacaggatcaagttctaagctatgcaaacaagactgtatatcttcattctccaaatagctgccaaacttattttgcaatgctattttcttattgttatacctgtctataaaatggaatgcactcgttcctgatagaaaaggctctcccatctcatcaaaaccgattgtgggacaaaattccaatcccacatggacaatcccactttcatttaattcgtctatacctatttcttctactggcttcatactatttgtatctgtttgtacaaagttaaaccatttaagagaagaatctccaaattaaattggcagtttctttcttacaatggtatgatcttccacaaatgaaaatggacaccctgatcgctcaaagtgtccatgaatatatataatcactaggcagaaaagacaggattaaaacatgataatttcgcatggttcaactcttttcttttttacaggctttttgaaattgaaactctttacaaaatacttcaaactatatatctgtgttttagaaaaattcctattgttcatcttgtcaatgaactgttctaaattggggcaattatagaaaatcgtattcataatatctttgtcatacttaggtggtttgatttccattcttttgcaataagctgcaattccattgtaataatcaaccaaaatccgttccgatacggaatccgttttttgtgcgggaagatcttcataaataaacctgtctgttatgacatatcctttttcaattttactaatcacttgcaaagaaatacccaagcggttcaactccttgatcttattcaagcctatacgaagcaaattcagctttcctattttatccaaactgtataagactgtattgctacctttgaatcccaagcatttcaacaagagtaggaaccctttcaagtcgcagggaatttcttctttcaaaaaatcataactcaaacgaaaccaattttcacccaaattagaatctggtattttgattgaataagtatttctgtcaaaaactcccaattctcccttcatcttttctctctttacatggagcaatcccaactgttcaaatttcttgatatacgagataactgtctttttggaatatccagacatttctgccaacgtctcttcctttatatgggatatatacatctttccgtcattttctagatctgtattcagaacaatacaactgaatacaaaagcctctttatgagtcaattttaaaagcgaatcctttgagattacgcggtaattcatagggatgtcaattaaagaaaaaataaatcacatctgcgagatagatatttccgctttcgccagaaagcgtgaaatctcatattaagtatttggtttgtaagtaattagtaagggagtgaaaaaattaaaccaccctacggaaaaaattaaaccgctcacttttcagggacaaaatacatattttccttgtttataggaatcaaagctcccgaacggatcatttttttgtattgggaacaacttaagcctaatgcattcttacaagccaggcgattcggataaattcgattggtttgtctaaataataccatttctgagaaaatgaattgataaaaaaacacatatctgagagccattgaagtaatcttgggaaatgggaacaggaaatcacccatctgtttaaaagatgtacaaagttactcatttctaatacctcaaaaaaatgaatcccctccaaactgaatttcagagataaagcatacctcaactttgaaaaagtactatggatcaaattctcatgtatgaaacgtgagcttaaaattcctctcaatagttaaaaggaaagtagtttgcagataatatttgatattttgttatttttatcccctatttaagaatgacaaaactctagttactgatatctaatttagcgataaaaataatatacaaaaatagaattatgaataatatagacaattatactatctttatgcaaggagtttttgccaaaactctaaaagctcaaggagtttcaacctatgacttatgtaagtttataaactcattgataggtgcggaaaattttctaagaaaccaccctatacctgttaaaagttactttgataggcatcaaccttgggttcataaacgagagactaatatcaaagaactatgcactctcaaatcaataccagattgcacattgaaagatattgaaactgatgtaagtcaagctatacatataaaaaatattacatcttttgaaattatagagaatgaacatttatggaataagtatatcgcttatgagcataggcacgataaacactcttctgatgattgcgattattacaccatatcaaaaactggatggacatatttggctcaaaaccctaatgtaatattagatatgcccctaatattgtttttagagaaaaaaaatgtaccaattttgttagaggaagtttcattgggggtatgcggtaactatagcgaggcagttgtgaaaaaatcttgtaatggattgaaactttttaaaaattgcaaaatatcagaaaattgtatttctgctattattaatgatccaataagatgggaaggtatattttataatcaagaattttgtaatgaaagtattttagattatattagatattccattcctatcattcaatggggtgagttaaattttaatattacaacttaaaaaatacaacattaatctatcctgacagaagtctttgagtctaactaaagttttatactgaaaactttgcaacacgacaaagcaagttaattttgaattttcaaacattaataataattcaaaaaagatcaaagatatcacagttttaataaccataattttctactactaaaataagaaaaatgtacttaaccgactaatggttaaatcaacaaattatcgagtaagaataaaataaatcctcttcaaaccaaattacagagataaaacatacctcaactttgaaaaagcactatggatcaaattctcatgtatgaaacgtgagcttaaccgcacttgtcttaaagacccccctcagtaggtgatagagaagtgaaaaatatgcaagcgatttacctctgaatctctttttcgaaaacggataaatgcctatcgaaccttggaaacaagggaaagagatttttaacggatagagattcaacaacggactgcgatattttcccctcttctcttttatatggtgtaatcctcaacactacgaaggattaaaaccaagccgatacacaggaattatcaacaaaaatcaaatttatatcattatggaaagtcagtacaaggtatgtgaagtgaaactcacttacaagtcaaagattaaagcctctgaaagagagaaaatcttatccgctgaaaatgcttataaaatccttttatctgtatttgattctgaaacaatacagtacaaagagtttttcaaagtcattttaatgaatagagccaacaaggtattaggcgtttgccatatttcagaaggtggattgaatgaaacctctgcggatatacgcattattatgcaggctgcaatattgggtaatgcttctgccatcatattggcacataatcatccgtctggaaacatacaaccaagtatgcaagacgatcaagtgacaaaaagagtaaaggagattgccaaattggttggtatcaaccttttggatcatcttatcataacggatgagacttattacagttattctgaaaacggacggatttaagattgtgagatatggaaataatactttatatcttaattgccgccattgtgtacctgatagtgttgttaatctatccgatcattccgtttatccttctttttaccttcttatataaggcggtaaaggaacaatgagaatcaaaaaagaatgttcacttctgttgaaagtgaatgttcttttgattttcaacaagttaccatttaaagaagaagagaggacacaaaaaacaatcacttttatttgtaatcaattaaaactgaatattatgagtttgaaatacagcacaacaacagcggattatctgagatgggatgaaatgtcaaatctggtcagaagattaagcagggatggagattataaaatgtccttgctgattgcgataggttgtttctggggattgcgtatctctgatatattgtcgttacgttggaaagatattctgaatgtggatgagtttactttgcaggaaaagaaaacaaagaagaaccgtacaatcaggattaatccccaactgaaaagacatattgcagaatgctacgatcacattcagccaatagggattaattcgcctatactggtaagccagaagggaacaacatactcaatacaaagaatcaatgtgatcttaaaagagatcaaagccaaatacaaactgaaagttcaacattttagttgtcatagcctacgaaaaacatttggcaggcaggtgtacaaccaaaatgcagaaaacgcagaactggctttagtcaagttgatggagttgtttaatcattccagtgtggcgatcacaaaaaggtatttaggattgagacaggaagaaatattgcagacttatgacagtctttccttttagatggttaatatttcaacttaaatcattgacacataaaacacttttcgtaactttgtggcaattctacaagttcatggcgttgaacctctatagaaggacatacgtttaacgaaaggtgttattgaaattatcttctattgacaaattctcgcaaaatttgaaagtagtatgaagatgatagcaatagcacccgcatcatttgatatatacttatctgtgaggataaattatatacaaaactggtgtgggttgctgttgctttatctatactacaggcaatgcgagaagcccgtcaataagataaagcaaatacagttcccacaccttttttatttgttaatctttccagaggggacagggagaaatacaaataaatatcattatggctagaaattggagtaaagaagaagaattaaaatggatggaagaagaacaaagagagatagagaatgattcctatttggaagatgcttatagaggtgcattggaaaatgatcctgccaatgaatggaatatagaataagttatatcaaatattatgttctattctataatgttttacactaataaaatgaataactatgtttacaatagaagatgcaccaaaatttgcaggaacacaaataagcgttaaatcacctggtgaattatctctatatatcaaagaaaatgaaaagtataaaattgaaagattgagaatattgggaccattaaatggtaatgatattttatttattagagaaatggctggtagtgattttattggtgaaaaaactaatgggaaattacgctatcttgatttatctggtgcatattttgaatatgaaggattatgctcccagaacttctctagtggctggcatactatcagaggatgtatcagtatgtttatgtttagcaattgtatttcattacaatcgattctaattccatcaaatactactttaatttgtgagaatgcttttagtggatgcgctaatttactcagtgtgttaatcaattcttcaatagaagatatatctagtagatcttttgctttttgcgataaattagaaagaataagtatacgcaataacagatattattccgtagaaaataaaggaaaaattctcataaataaacaagaagaacttatattatgtcttaatagcatatttaataaacaagacgatatatatttaaaaaaggattttataaagattccagacaaaataacaacaataaaaaagggggctttttacagatgtacaattgacaatttagcaataagtaaaaatattaaacacatagaatctaaatctttccaaaattgtcgtataaaatcgttatatatatttagtaatcaattaaaaatacacaaagaaggattctttgattgtcattattttgatatatcttcaagtatatattgtctttcagaaaatcctcctatttacgaaggcgatagaattgattttgtaacaaaaaccacttttctatttgtacctatggctgcactacataaatataaacaagatcctatatggaaaatctgtaatataatacctttgtcgttagatgaaattgatattatagaaaaaaagtataataacatcagtttataatagagttgatatggattattttcaatcatcattaattattaatgtctatagtttacaaaattcaaaatgaattggataaatataaatatacagctacttctgctactaacgctattttcaatattttcttctgcaaaaaacaattcacattttgatgcaaaaacttcccttcgcattacactgcaagaagtcaatgcagattcaggcttagttatgttgatggattcagcaggaaatgtcatagccaaaagcagtctttctcttttaaatgataagtctttagaagatgaagtatatactacagttagagatatggggacacttgctgtccctgtatctttaattcctgttttggagaaagggaatgtttcactgtctgacactgttgatgtgggtaatggtatatataatcacaatggaaaagagatcagggatcataatgcggatatgggtggatatggagatattaccttacaacaagcaatcctgtttgattcaaaagtgggtgtaaccaaatctttatctccatatatgacaatcaaaacagattattctcctatggagatacttaatttctatcattcctttgctgtatcagattattctatttgttctgcaaagacaatgaaggagatacaacagacctttgaaatggtagtcagtgaaggtacgggtaaacctttattttctgataatgtaaagatcgcaggaaagacaggatcagttattaaagaagatggaaaacatgaagtttccttctgtggttatttcaaggtgaacaatgctgtatatacctgtttagtcattatttccaatcctaaaaatggttatccgtctggtggtataatggctggggatgtggttaaagggattattaaatatatacattaagattatgctgaatagactcaaacatttatttggagataaaaaaaataaggaatttggaataaacaatattactccaatagaaaagattgcccccaaagagcagattgatttgatccgcttttttaaaaatgaactaccagatagtaaaggtcgctaccacaaagatattctacagttcaatcatgaacagatagaatataatcacgatttcatacaatggattctacctactatcgacaaaagccagtttcatccagaggctccaaccatcgatggacactttaagggacaattgcaacatgacgatttggcaaagtcaaactattgcaaaacctgccaattatatttgaattatattggattccattgtaacaaaagacggattcaatgtcaaatcacaggacgactttatgaattgccattccataatcaattaaggattacccgtatgctaaactctctcaatcaagtgggaaataatcaatgctcaaccaatctataccatgctatcataagtgaaattaagcctgattccgacaaaattaataataatacattagagtattgggcaaaaacacaaagaataaatagaaactgtaacattcttataggagcaatcgcaggagatataataggttcaatttatgagtttaatcctataaaatcaatagactttcctctattcaaagaacattccagatttacagatgacactgtaatgactattgccaatgctgactggctattgacaggtgatagcttgtctggtatcatgttaaactatggcaatcgttatccaagggcaggatatggaaaatctttttacaattggttacaacaagatattccacaaccatataatagttttggaaatggttctgccatgcgtgtaagccctgttggatgggtgttagacacattagaggagactttgaaaaaagctaaagaaagcgcagaaattacccataaccacccagaagggattaaaggagcacaggctacggcagcatgtatttacctggctcgcacaggaaaatccaagcaagagattaaaggatatattgaatctacttttggctataatcttagtcgaacctgtgatgaaatacgaatcgcttatcaattcgatgttacctgtcaaggttctgttcctgaatccatcatcgcttttctggaaagtaaggattttgaagatgccattcgtttggctatttctttgggaggagatgccgatacgatgggtgcaattactggaagtatagcagaagcatattatagaaatgttccagatcatataaaagaggaaatccttaaacgattaccagaagagtttatcaacgttatggaaaagttctacaagaaatttattatgaaaaatgacgataaattttctgataaaaacaaatctaaccaatagataaaggattatccgtctggtggtgtaatggcagggaatgtgattaaagaaattgttaatagtttaaataataaataaatataatatggtgatgaaatattatattctcttacttggattatgtttgcttggttgtaacagtcagccaagtaaacaggataaatctatccaacctgtaatacagaaagatgataagtttaccaatcactatgaacttccactgacagaatcagaaaaaagagaagtgttacactatgctgattctgttttgcaagtgaaaggtataaaactcgttgattataggaatgaaatttatcagtatggagatatacgtttttattggaacaagaaatttaattacttcttggcatatccagattcgttgattcatggggaagaagcatttctttgtgatgggaatcatttttataataaggacagcacaattgtattaaatactggcattgcttactatgatgtatttgaagatgattattccatttctgaattttttaaagagttcatatttgaaggtgaatctatttcatataagcaatttaatgataccaatttctatttgaaaggtaaaaataaaacaagaacattatttattcgaataggagtttatagagaaatttataatcgaaaaattctcattcttttggagttagaatacaaggactgcaaacgaaaagatgcagaatgtatttggaatacttacattaagaagaaatttcccaaccaacctttacacaacattatttaacaatacaagtcaatttattgcatttctgtttcctgtcccagcatatttaactcaaatgtttcgtcaagtttttctcattcaacaaattacacacatctaatatattaattcctaattcagcacatctattcactgtatatcgttctgcatacatttcctgcaattcatccatactaaaaatttcatctgcatccacattagtgccgttcactcctacttttatctgctcattatgattacaagttatatattccattatggaaatatcatataattcattcaagaaaaaatcataagtcatacttcctgtggatatatgacacctctgttcaagtatctgcttaatcaaatcatatctatcttttctaccctgttcagtctgtaaatagtcagataattgtttaagcgtatatacatcattgttatatcgtacctcatctgataacatatcattgataaacaaatatttataaacatctacttccttaaataatttactattatcacacgatatactagcatttactcgttttgattctgttttttcaacatctgtcacacctgcaactatatctatcttattatccatagataattgcagatacacttcatctaccatctttgttgatttgtgtcctaccatatacttaataacatccttagatataccatttaagaatgaattagtaacaaaagtatatctaccaatatgagagcgcatttgttcatagattggcttaccgtcaactaatctatctaagtttgccaacaaagcaattttcctcaaacgactattatatgtacttgtcactggttcttctaagccttttgggtatttagacaatataggtttgatcttgtctgctttaataaaagcatccacccccttcttttgggttttaatcacaaatacattccgtctctcatcatatatataatcgtcctcaaatagcttaataacatcagactttcttgtaccagctaagcactgaactacaaataaatcccttgtttctattagtttttcattatctaattgaagatttgccagtttatctatttcttcttccgtcagtacaattctgaccgtttctttttcgtttctatttttataaagcctaaaagatctcataccgctttcagcataactaaatggaatattatgcttactatcagcttctttcaacaacatttcaaacatactaaagacagtcttgatagttttattcttactacctacatctatatacgattgctgatagctattaaaagtttccaaattcatattgttccaactatctgatataccattagcttttaaaaaacgtctgaatttattaacattcccatgatatatttttttagtcgaatcaccaatattcaaattctcacttataaatccatccattgcataagttgctggcttaacgcttacatttctcatttttatctgacctttataaattttgtctttcaatatgttcaaactatccgctattttatctggattgtcacaaaaatacttcttgcactctgaaaaagaaactttcaactcatttattttattattagcaatctcattatttctattatccaattcaggcaaacggaaactcacataagcttcctgcttctccttattccaatgttcaggataaacttttacacccgttgctaattttagctgtttcccattaatacggacaactaaatagatattggttggcttattggctttaggttgtcgtaaattaaatcttgcctgcatttcattaataaaaacctgctgttccatccctgttattcaaattggttcttcacttttgttctttgttttcgttctttttatcagatctacgctacccagtttcaaaacagcattcatatatacatttgatattcagcgaaaaaactttttgttgatataaccaaaaattcttcgtatctttgtagcgtctttataaaactagtttacagaatggatgcaaaaaaaatcttgtttatagcccaagaaatcactccctaccttcccgaatccgagattgcgacaatatgtagaaatttgccgcaaggaattcaggagcgtggtcgcgaaatcaggacattcatgccaaaattcggaaatatcaacgagcgccgcaatcagttgcacgaggttatccgtctgtctggtatgaatcttattattgacgacacggaccatcctctgatcattaaggtagcatccattcaatcggcccggatgcaggtttactttattgacaacgaggatttcttccaacggaaatccacggtcagcgatgagaatggaaatgagtatgaagataatgacgatcgttcgatcttctatgtacgcggagtattggaaaccgtaaaaaaattgcgttggattcctgatgtaatccattgccatggctggatgtcagcgttaacggctctttacatcaagagaatgtatgccgatgacccgtgcctgcgtaatgcgaaaatcgtttattcgatctacaacgatgacttcaagaacccgctaaacaaagatttcgcgacaaaactgaaggcggacggagccaaagaagctgacttgaagttaatcaaggcagatacaagttttgtgggcctaaccaaattagcgattgatttcgctgatggtgtaatccaaggtagcgagacgatcaatcaagaagtccttgattatatctctgccaagaaagatactcctttccttccctatcagtcaccggaaacttatatggacgagttcaataagttctacgacgtggtattggattctaacacgaaataataaatgtagtaatgaaaatcaagcttttaatacttggacttggccttggtgctagcattttggccgggtgtaatgatgattttagttcgataggaacaagtattcagccaggcgacgatacaattgcggtatatatggacacgttccagatacaagccactacggtgcaattagattctatttacgcaaggtctactagcgcccagttgggtgaactctacgatccgctgtatggtaaccttgtatcggattatatgtgccaattctattgtccgagtgattttcaatttaagcatacaccttatgagggaaaaattgattcggtggaattcaatatatattataatggttccaataaaaacggtgtatgggtaggagactccttggcgcctatgcgtgcggagatctttaaaattacaagtccgttacaaaagaatttttatacaaatattgaccctaagcaatattgcaatatgcaagagtcaatgggtgctcaagcttatacagcttataacacaagtatatccgactcccttagaaactctgatggttacagccctcatgtaagcattaaaatgcctactgagttcggacaaaaattttatgatgaaacgattaataatccgggtacattcaagaatcaagaaactttcaatgagtttttcccggggctttatgtaacaactaccttcggtagtggtaatatattgtccgtggctagctctgtccttaagatatattataattatgcggttaaaagcacagcaggaaaagactctttaataaccacgtgggaagctttctccgtcactaaagaggtcattcagctaagtcgtttcaaaaatacggatatgagtcaattgctacaaccgaacgacagctatgcattttttaagactcctgccggcgtttgtacacgcatcgttcttccgacacaggaaattactccgatcatggaaaaacgtatcgtgaataatttaccactagagttaaaagcgatgccgcaagaagattggcaatatgcgctggctcctcctccttatttattgatcttgccggaggattctgtaaagagtttctttgagggtagtcaaattgacaataatgtaacctcgtttctatccaaggcttacgatgcgactactcgtacgtactcattcccgaatcttgccaatttattaaaatatcagatggagaataatccggacaaagatttgagtttacttcttatccctgttcaacggacaacgaccacaggtaacagttacggtcaaagtacagttgttacaacagccatcacgaattatctagctccctcaggtgtaaagatacgaaaggatgaagaggtgatgaaaattggtattacatcatgtaaatatgtcagatagcaaagaatctatataataaaaaaagcgagatgaaaaacatctcgctttttttatatccgtatctctaaggcaaaaaataacgggtccctaaaaggacccgtcactctccaaaaatagtctagtcaaatcaattaacgacttatttcttcgccgccttcttttttaatttatctaattctttctgtagactctcgatttcctctccttgattcttaatcgtagaaagcaatgaattcaattcctcattctctatattctccgggaattccgcatttacacgaacaatgaaatcggaaagaacattcatatagttattaaatgcatcatacggattatcgtaagggctaaagccaccttgtcccatatgctttgtactcatataatagaaatggtcactgctctgcagatagtaccagtcctgacggatacgacgagtctgagacaaacgaacacgttcaccgatctcattaatcttacggaacgcttcctgctgcaatacatttcctaaccaagaactacaatctctctcctcatctacccaagagatcggataaggaacggagatagagtctaccggcttgatcaatgtaaatacttccgatggagtagagaagctaatccccttatccgcagcaaaacgaggcaaagccttgaagaactcaaaaataccggttgaagctggatgcaaagatcccagcacctcataattcataaacaaattaatgatttgctctgaatccggagtagcagcgatccatgacatatacttatcggctgtcaaaggatactcattccaactataatcactgaaacggttcgataaatcctcgctgaaacggtcattcttcaataataaactcaacttcggagctacgcaagaagaatacatatagttcggactcttccaacctaagatatgcttagcaccctccgtcaacatccccttatagcccatctcagaaaccatagcggaaatatcatccgagtaaatcaactccgtattacggaacactttcggtttaaccccgaataaagtcttgatcttatcttcttgtttctttacttgatgcttgaactcctccggatctcccaaggaagaaagagaatgagcataagtctcagacaagaattccacattccccgtagccgccaattccttaaagctatcgatcacttccggagtataaatctccatctgctccaacgctacgccggaaatagagaacgctaccttaaacttaccaccactggtcttaatcatctccaaaatagtccggttagccggcaagtaacattgttcagctatacgatggataatctcctcattctggaaatcatcgtaatagtaatggtcgttacctatatcgaagaagcgatatctttttaaacggaacggctgatgtatttgaaaataaaagcagatcgttttcataatattgtttgttttatttttgtcttgtcgttaatttatttgttacctatcacattgtcgtaaatacgacgaaccttttgtccggcatattcccatttgatattatccacctctttcttaccttccactttcaagaactcatgcatggcaggataagtaataattgaatacatggcatccgctaacgcctcaatatcccaataatccaccttaatcgcataatccaagatctcggcgcaaccggattgtttagaaatgatagagggtacaccacattgcatggcttccaacggagagataccaaaaggctcagaaaccgaaggcatcacatatacgtcactggctttcaacacctcatagacctgcttgcccttcataaatccggtaaagtggaaacgatctgaaatattacgtgctgcggccaaacgaatcatttgatccatcatatcaccactaccagccatcacgaaacgtgcataaggagccttagccaaaacctttgcggcagcctcaacgaaatattccggccctttctgcatcgtgatacgacctaagaatgtaataaccttatcctttacaccctttttatctgggatcgctaaaatctcaggacttaaaggctctacggcgttatgtacggtcgttaccttagcgggatcttgatgatatttctcgatcaccgtctgacgagtcaaattactcaccgttatgatatgatctgcattgtccataccattcttctcaatcgcatagacatccggattcacattaccacggctacgatcataatccgtagcatgaacatggattaccaaaggcttaccactcacatttttagcgtgaatacccgccggataagtcaaccagtcgtgcgcatggatgatatcatactcttccgtacgagcgattactcccgcaacgatcgaatagttattgatctcttccagaagattatccggataacgtccggaaaactcaaggcaccctaaatcagtcacatgacgataactgaaatccgcataaatatgatccctgtacttataatactggtcagcgttcattcccgctttggaaacccgttgctgcacatattcacggtcaacatccttccaaacaatcggaacttggttgacacccactatctttagaaagctctggtcttcatcgccccagggcttcggtatacaaaaagtaatatccatatcgggctgcattgccatgcctcgtgtcaaaccgaaactggccgttcctaaaccgcccaagatatgaggaggaaattcccatccaaacattaatgctttcataatggtacttagttttattcggcgttatacttcttcaacaaatccacaacacggaggatagccgcaacattcatcgcaaaagagacagctccacgtccggtaaacggtgggttaccatcaaacaattccgggatcgtcccgatacagtgtaatgacatctcctcctccaagcttatcaacatacgttcagcaaaagcaacgccactctttccgaatacacgcaaataagcttccaaataggcgcctaacaaccacggccaagcagtaccttggtgataagccaaatctcgttcatattgcggccccacataatacgggcgatatccttcgctcttcggactcaaggaacgcaagcccttcggggtaagcaactctttcgtcacgatatccactacggcacgtttctgcatcctcgtcaatggggaataaggcaatgccacagcgaaaatcatattaggccgtacgctccaatctaccgtagaaccattcacggaatcgaacaaataattatacccgttcacaaaggtttccgggaacgatttatccatcgacttgataatcggatcaataccctcgacaggtactccccccatcaattctgtatagaaacaaagagcattataccaaagagcgttaaattccactatataaccggaacgagttacaacaggttttccgtttacggtagaattcatccaagtaatcgccttatcttttccattagcgaaaagtaaaccattctccatcaatttcatatcgggatgtttctggtcccgtatataatcgataacttctttcacgaaatcgccatatagctcacgtgccttttcaacgccttcatgcttagcatactgttggatcgcccagatcgcccataaaaagacatccggatgctcgatctcacgaatcaccgcatcgaaacgcccactctccatatacgcccgcatcgccggcatcgccgtatgcatgatcttctcaaaacgaaccggatcatcgatagacaacgtactacccggaagagctacgaacaaatctctcgcacgtactttaaaccatggatagcccgctaatagataagcgtcgtctcccttgggacgaaaataaaattgctgagcggaattcttcaagcaattgaagaagctagtacgaggtgtacgagctacgacctcattctcatacagtgccttcaagcgggtagttgccactgcactatcgccagcgctgaaaataatagtctccccttttttgatagggacctcgaaatatccgggaacatacaaatcctcctgataaggatatcccctctcttgttctttcggatactcgatgccattgtaccaatacggctcatacacaaatttaactttcttgttaaattgcatatacagttccggataaccgggatacatacatgtcttgattccgtttgtgacttcctcgtaagattggttcacgttaccattggcttgcgttaagttcttcacgctacggaaagcgaggaaaggacggaaacgtaaggtcgtagcggaatgagcatcttccaacgtatacttaatcatgatacgattctcgtacatggaaaacactttctctttcgagaagatcacacctcctacacggtaaagcgtacgaggtactgtctctgagctatactcgcggatgtacttatgtcccttgggactgaaattatcgcctgcatatttatgcaacccaagattaaattcggcaccatgttgaattaccgtctcatcaaaagaagatagtaacacatggttgtcatcatcaatcgcaggcacaggcataacgagtagtccgtggtatttcctggtattacaatcaacaacagtagtgcagtgataggctcccaaacggttggttcgaagcacctcacgagtcagcgactcttccaggtttatcattactgttttgtcaaatttaagataactcatatgtgtatttgggttttaagttactttctttaatatcaaaatgaaattattttcgtttctgagaatcaaaagtattatttaataactaaaaaaacaaactgtcttttatatttatttagaaaaaaaggcatccttcttctacgataaacttatagatcaaggctttaaaaagaaaggtgctctaaaggagtgttttcaaacatataaatttttgttaaatcaatcctattatcatattcatcaaagctcaaaatcaaggtacagccccccgaaaacaagcctcggtttagtcataggaaatgttctatttttcattttaaatcaatctgaatataaaaacagatgcctataatgttcctgtgattaaaatgcctacctttgcggaaattttcaaacaatttttaatatgaggaagttattatataatgtagtaattttattaagcgcaattcaaatgacacacgcagcaaataaccctttcttcgggaagtttaaaacaccgttcgagacccctcctttcgataagatcaagatcgagcattatgagcccgctttcgacgaaggaatcaagcaaatggaaaaagaggtgcaagagatcgccaataacccgcaaccggctactttcgagaatacggtagtagctctggaacgtagcggcaaattattagaaacagtctcttctgttttttttaatgtattaggggcagaggctaacgacgaaatgatggaaatctcgcaacgtgtctccccgaagttatcccagacatccaataacatcttcttaaatgagaagctacttgctcgggtcaaatcaatctatgataaaaaagaacaattgaacctttctaccgaggatgctaaattgctggaagacctttacgagtcgtttaaagcgaatggggctacgttaaataaagatgacaaggaaaaataccgcaagctaagtatggacctaagcatgttaaccttgcagttcgatcaaaacgccttgaaagataaaaaccgattcgaattactaataacggacgagaacgaactatccggcttacccgaaagtgctcgtgacgcagcggccatgttagccaaaagtaaagataaaaatggatggttattcaatctctcggctccgagttacattccatttatgcgttattccgacaagcgtgatttgcgagaaaaaatgtatcgtgaatacatgagcgtaggaaataaaggggatgagttcgacaataaggacattatcaaaaagatcgttaatatccgcctagagatcgcccagttgatgggattcaagaattacgccgaatatgcgctggaacacacgatggctaaaaactcagcgaacgtatacaaattattgaatcagttactcgaagcttataaaccgatagcgatcaacgaatacaatgcagtagaaggattcgcattaggtacagagaaagagaatatcaccgttatgccttgggactggagttattattccgagaagttacgggatatccgcttcaaggtaaacgacgagatgactcgcccttatttcgagttaagcaacgtaaagaaaggcgtattcggattagctacccagctctacggtatcacctttaaggaaaacaagaaaatcccggtttatcatccggaagtagacgcttatgaggtatacgatgccgatggtaagttccttgctatcctttatacggatttcttccctcgtgacggaaaacaatccggcgcttggatgaacaatatcaaggctcaatacaaagataaagacggaaaagatagccgtcctcagatcgttatcgtgatgaactttacccgtccgacagacacgaagccctctttgttaagtttcgacgaggtgaacacgctcttgcatgagttcgggcactccttgcacggcatgctagcgcaaggaacctattccagcctttcgggaaccagcgtttatcgtgatttcgtagaattaccttcccagatcatggagaactggttgactgaaaaagagttcttagatcagatcgccgttcattaccagaccggagagaaaatcccgcaagagatgatacaaagcttggtaaacgcctctaacttcaacgccggctacctttgctgccgccaattaagctttggcttgctggatatggcatggcatacgttggagcaacctttcgacggtgacgtagcgacattcgagaaaaaagcttgggctccgacggtaatcgtaccggaagtaccggaagccttgatgggcacaagcttcggacatatcttctccggaggatacgcggcaggctattacggatataaatgggccgaggtattagacgccgacgctttctccgttttcaaatcgaaaggaatcttcaacaaggaggtcgcgaaatctttccgtgacaatatcttatccaaaggtggtacagaagatcccgccgtgttatacaagcgtttccgtggacaagagcctacgatagacgccttattaatccgtaatggtattaagaagtaataatttaccgggcttatcgcccggtaaatctaaataatcactacctttgtgtctggattaaaagacaaaagagtaaacaaatgtgcgagaaaacagaaaaacagcacgaattagataaacgttacctgcgaatggccgctatctgggccgagaattcgtactgtaaacgacgccaagtgggcgcattattagtaaaagataaaatgatcatatccgacggatacaatggaacacccgccggttttgaaaatgtttgcgaagacgagaacaatgtcaccaagccttatgttctacacgcggaggctaacgccatcacaaaagtggcagcctcatcgaacagcagtaaaggagcgaccatttatgtgacctcctccccttgcattgaatgcgcaaaattaatcatacaatccgggatcaagcgagtggtctattccgagaattatcgcatagcggacggctgcgaattattgaagcgtgccggtatcatagtagattatatagatttgaacgaataaataaaacgtttttatggataaaaacaaaagactgaccgtatggctcccggttatcatcgcggctagtatcgctttaggtatctttattgggaaccattatttatctatcagtcaaggaaaaaaacggtcctactcctgcggtaacaagataaatgccatcttggacattatcgacgagcaatatgttgacacggttagcatgtctaagctggtagagagtacgatcccgaaaatattcagtgaattagaccctcactccgtatatatccccgccgaagacgcttccgtggtgaatgaggagctggaaggttctttcagtggtattggcgtatcatttaatatgcaaaccgatacgatcctagtgatcagcgtaattagcggtggtcccgcagagaaagcaggtttactgcccttcgaccggatcatctcgatcaatgattctattttctccggtaagaaaaagaaccaaggagagatcatgaagacactccggggcgcaaagaacagtacggtgaaactaggcgtacagcgaggaaattctcctgagttgctctattttgacgtaacccgtggagatgtccctgttaattcggtcgatgtttctttcgaagcggctaaaggtataggttacatcaaggttagcaaattcgcccggaatacttataatgagttcatcacggcgatcgccaagctgaaacaagcgggctgtacctctttcgtgatcgacttacggggtaataccggcggatatatggatgccgctattaatatgattaacgagtttatgccggaaggacgcttgatcgtctacacggaaggtaagtcgttccctcgttccgacgtatatgcgaacggaaccggaacttgtaaagacgccccgatcgtagtattgaccgatgagatctcggcttccgccagtgagatattctccggagcgatccaagataacgaccgtggtacgattatcggacgaagaacgtatggcaagggtctggtacaaactcaaatgtcattgagcgacggttcagagatgcgattgaccatcgcccgttattacacgccgtccggtcgctgcatccagaagaaatatgagatgggtaatacggacgcttacgaccaagatatctataaccgatatatgcacggcgagttcgactcggccgatagcatcaagatggatgattccttgaaataccagaccgtaggcggacgtaccgtatacggcgggggcggtatcatgccagatatctttatccctcgtgacacgagcggcgttacctcttactactcaaatgtggtaaatagcggcgtgctttacctgtatgcgctcgagtactcagaccgccatcgggagaaactaggctcattcaagacttgggaggaattatataattacttgcagcaacaaccgctcctttccgacttcgtgaacttcgccgctaccaagggcatcaagagacgtcctacattaattaatatatccggcaagttaatcgagaaccaattgcaagcgtatatcgtaaggaatttcttcgacgaggcgggcttctaccccattttcctaaaagatgacgttaccttattacgtgcgatcaatatcttgcaagagggaaaatctgtgccgaatgcggaactattaaaacaatcagcgaatggagacttacacagccaagcaggccctacgaaaagatatggcctctcgaaaaaaagaatattcgaggattaccttgtgcgagctatcggataagatcatggaccgcttggaacagacggaactgttccaagcggcttcttgcatcgccctttatcacgccataccgggagaagtacagaccgccggctttatcgagaaatggtaccagaagaaaaagcttctgttgcccttgatcgtcggtgatgatttgagattgcttctttacgaaggaccggaatccctaaaacccggacctttcggaatattagagcctaaggcggacggcatagaagttccaaagaatgagatagacttgattatcgtgcccggagtcgcctttgacaaagacaagaaccgcatgggacgagggaggggattctacgaccgccttctttccacgctcaacgctcccaaggttggcatatgcttcgggttccagatgataccacaggttccggtagagccactcgacaagaaaatggattacgtaataacagaagacaccatctattgatctctccgcagaatatatacttactgggtcaagccatatatacttaccggggctgggcagtatatgttacttgacccagtaagtaatattgcgaatggtaaagccacactcaatgaaaaacgatattggtaatgaccgaggcacccgcataatcattcaagcttttcaccaaccgttcccggcaaagcgtcaactcgctacgaagtacagaggaagtcaatgagacatgaagcaccttatcacgtacatatatattacgtgtgtactgcatgatcgtaggccctaaaacttctccccacgcacgttggacccggatctccatcattttctcgtacaactcggtattatcctcgaaaaagtcacgaagcacttcccccaatgtctgtgtatttcttctctgcattcttattcctccataggttgtacctcgccacgttccacacggaagagagcatagtcatgattcatagccaataagatctcatccagatacttccggttcgtatccgtaataaaaatctgcccgaagccattctcgctgaccagtttgatgatctgctccacacggctagcgtccagcttatcgaaaatatcatccaacagcaagataggtgtagtctgtccccgtttatttaggaaagcgaactgagcgagtttcaaggcgatcagatacgtcttattctgtccttgcgaaccaacccggcgaatcaggtacccgcccaacgtcatttccagctcatccttatggataccggaagaggtatagcccaatatacgatcccgttcccggctcatcgccaatttaccggcaagctccgtttcctccaattgcgagatataatgtagccctacctcctcggcagagccgcagatcgtctggtagtactcattaaagatcggggtaaaatcctccaccagttttttccgcttctcgtaaacgatttggccgtacatacccagctgcatctccaatacctcataaagagaggcatccatgctctgatctttcagcaacgtattccgttggagcaacgctttattatattggataagcgcatgcagataaggcttgtcctgctgcgagatgattaagtccagaaaacggcgtcgctcatcgctccccccccggatcaagtcggcatcagccggagaaaccatgaccaacggtaataggccgatatgctcggacagcttgtcgtactccttcttattccgtttgaactgtttgcgttgcctacgccgcatggcacagaaaatctcctcctcacgtccctcataatcatagttaccctgcaccacgcaaagatcttgatcactgtttattatctggctatcaggcgtattgacatgactcttgcaaaatgagagataatgaatggcatccaatagattcgtcttccccatcccgttattgccgaaaaagcaattcatcttgggcgagaaaataacctcggactgaagtatatttttgtaattgagaacagaaagcttctttagtatcatctaaaccgtattaatcgtacaaaattaaaaaatatacttctaagtatagattatatcagcaaaaaaaactacttttgcgctttgaatcgccaaccatatggtatggcttaaaatcagcgataaaattaataaataactataacacattatggctactaaagaaaaggacaccaacaaggagttagaagtagaagagattgtctccaaatcggagcaattcattgaaaacaattcaaagaagattatttacggtataatagctgtcgcactcgttgttggagctgttttgggaatcaagcatggttatttagttcctcaggagaaaaaagccgccgccgccatgttcaagggcgagcaatacttcgccagagattctttcgccttggctttaaacggcaatggagctgactatgaaggtttcgaggctatcatcgaccaatatggaagcacggacgccggaaacttggcgaaggcttacgcaggtatctgttactacaagatgggcgatacacagaaggcgctcgatttattgaaatctttcagcggaaaggaccaaatggtatctccggcggttacaggcttgatcggtgattgctacgtgaacatgggtaatacgaaagaaggaatcagctatttcgagaaagccgctaaggaggccgacaacgaggttatcagcccgatttacttgaagaaggccggtatcgcttacgagaacttgaaagagtatgacaaggctgtaaaggcttacacgactatcaaggacaagtattacacttccatggaggcatccgatatcgataagtatatcacccgtgcttcggcaggaaaataaataaacagtatattatatagtataacagaggatgtctcggtcaaacaaggcatcctcttcttttaaagagacaagtatggctacagcttatcagaatttatccgagtacgacttcaacagcgtacccgatgcttcagagatgaacatcggcatcgtagttgcggaatggaacaagaacattaccgagaagttattggaaggtgcttgcaacacgcttgaaaagcacggggtgaaaccggagaacatcgtagttaaacgagttccgggtagttttgaactgacttttggagccaaaagattggccgagactaaagaattagacgccgtgatcgttctgggatgcgtcgtaagaggcgatacaccacattttgattacgtttgttccggcgttacgcaaggcattacagaattgaatttaatgtacgatattcctttcattttcggcctgttaactaccgacaccatgcagcaatccgaggatcgtgcgggaggtagatatggcaataaaggggacgaggcagcggttaccgcaataaaaatggtaaatttttctgcctaaacgcttgcaggtttcaaaataaatcgtacctttgcactgcaattaagaacaagggggcagttaccagagtggccaaatggggctgactgtaactcagctggctttcgccttcggtggttcgaatccatcactgcccaccttaattgatcggttcactatgtgaaccaattctttcgaaaaccgaaagaatacatattgcggaagtagctcagttgatagagcattagccttccaagctgagggtcgcgggtttgagccccgtcttccgctctaggaaaagaggaaaatcgaaaggttttcctctttttttatatcctcacgatactatatatccgggataatgtctactttagcccccaatacaacaaataacaaaaagagagatgaagatggtgaaagggatatacgtgttgctgacaatgttcctattgatgggatgcgctacggtaatgaatccttataaaatggataaccggatgcataagatagagttagggatgaccaagcaaaaggttatatcgatactaggaaaggattttgagtcggctggcgcacgaataaccccggacggccccatagagagtatcagttataagacggtcaccatgacgatagccgactactctgaaggctactacatcctaagcttcaagaatgggatactggtagaatggttcaaggaaaagacaccgatcaataacaatacagcgaactaaggtctccttttaggctactaaaaacaaataaggcagatgcctctgggcatctgccttcattcttttacgattataaactttcttcgatacatgaatccggttatgactgaccggcctgccgtggttttctaactcggcctcacgactgcctttccggttagcctttatgtactcgactaacggatcttgcttttttctctttgtcttcatagctttattgcttttatatcgctttcacgaacgcaaagatacgaaaagaattcatttcacctcactatcgtcccaagggtattttcttttcggatttcgagggaaccagcctttctgcacacgctcctcctgctcgaaaatctccttgatcgtccagaacgatgagaaggcgaatacgccgcaaatagcggacacaaacacgctgtctataaacagggaagctatcacccctaaaatccccaagacaaggaatatccaccagcacttcgtcccccaataatactcggccttcacgactaccggatgaaacagaccgataatcaagaatgtaacgataccgatcaacaacccatcaaaatttatcatatccatatctgaatatttatacttattactattatatgtaacaaatatacaaacaatattccacttaactaatcatttctttctatgaagagatagaaacttctattcgtaataatcgtctcacaaagatgaaacgatcttttcatatacgtgatacgatcttttcacccttgtgatacgatcttttcacataggtgaaaagatcaagacctaaagaagcttacacttaaagtagcacaaaaaaaagtcacatccattgttagtggacatgacttctatattgttttcaaataagattcttatctgttgctttcctccgcaggtgtagtagtagcgggagtttcctctgccggaactgccggttgttgagccgtaccaaagtccggagcgatcgtattcggatcgatagagatagcgtcgtttacttgttgcttgatctcagattgagcggcatgctccgctctggggataaatgcggtaatcaagatactcaatacgattacggtacccgccaaactccaagtagctttctccaaaaagtccgtggtcttacgtacacccatgatttggttagaagaagagaaccctgaagccaaacctccacctttcgagttctggatcaacacgatcaagattaatagtatagaggcgatcaggattaagatagaaataaatacgtacatcttagttttattttttagtgttaataatcaacttttccaaaaatctgatttggtctgcaaagtaaacatttttttctggatatttcaagcttaagtttttaataatttgcaaagccttatcatatcgcttctgttttatataaatccgagctaaagtttccgtaaggcacgagtcttccagcgatttggactgctcatcatccaaatctttcaccgactctggagtctccgcacggctgttttcctctcggatttccagcccgctacccggcatacgctgttggtcatttttaatgaacgaatcgatcaagtcgtgatgtcgaagcctattctccgcatcctctccagatggcttctcttcttcctctttcgataatgaccaaaacatataatctgacgataccgatggctggaacaggaacggagcttctttcttaggctccggttcctcgttacggttagagaggaatgcgtctatcaaggagaaagtatcctcttttcgcatatccggctcatgctccacacgggagttcaagccatatttatctccctctatcagttggaacagctttttccgatccggcaagaatatcgccatcctctccagctccgaggtaaaactcatatcatttaatacggccagattctttagatacaacatccgtgccacttgaaaatacgggtaatcctccacgattcgtcgcaactcaagaagagtcccctcggtcaattccgaaggctcctccatcaaacgatataaatcctccgccctcattctaccaattggcaaccgtagcgttatagatttggtctactatttcctctatgatttcctcgcataatgttccctctacctgctgcggcatcaagttactgtcgaactcgcggtaagcggagaacgactgctcaaaatcctcatccgggttaacccggttggagtaacgaacccgcaccgtgatcgtcaacctcgtctgcgaggcgatagcatcctccttcacggccattggagcgaaatcgtaaccagtgatctcaccctccaactcaaggtcgccattgctcggaaccagttgcagacgagtctgacggatgtaaatatccttcaaatcctccgtaaactgcggcgcaagggtcggattcacgtagggagcttggttcgtgaagtcacgaatcgtaatggtcttcaccttcgtataatcgatagaggctccattaaacttataggaaatagagcaagccgtagccaataccgtcaagaatgagagtataagccaattggctgccgacaaacgtatgttgacaatcttctttagcatatttttattccaaattgtattccttgatttttcgatataacgtacgctccgatatcttcaagtcggccgccgcgttcttccgtcgcccgttatgcttctccagagccttacggatcatctccttctccacctcttccaaggataaagtctcctcttccacatcctcggcatcttggatcgtcgggtgcatggcatgaaccgccgccggatggatcggatgcgcataaggggtatcgtccgccaccgttggcatcgggatattccctcccatgatatcatgcactaatttctttagctcgttcacgtcctttttcatatcgaacaagacttgataaaggatctcccgctcgctgttaaatatcttttgatccggatcttgcttcaccaataccggatatttctcaacgttcacgttcggcagataaaggcgcaggacatccgccgttatatcccgtgtctcctcgattacggagatacgttccgtgatatttttcaactcacgcacgttacccggccaacggtaagaaaccaataattgacgggcctcatcatccaagcggatcggcggcatccggtatttctcggcgcaatcactggcgaacttacgaaataataagacgatatcttccggacgctcccgcaagggaggcacttggataggcaccgtattcaaacgatagtacaaatcctcacggaatttaccttccgaaaccgcctgcactaaattcacgttcgtagcggcaacgatacgcacgttcgtcttctgtaccttggaggaaccgaccttgataaactcacccgtctccaacacacgaagcaagcgtgcttgcgtaggagttggcagctctcctacctcatccaagaagatcgttccaccgtccgctacctcgaaataccctttacggtcggctaacgccccggtaaaagaacctttctcgtgcccgaaaagctccgagtctatcgtcccttccggaatggcgccacagtttacggctatatattgtccatgcttacgctgactgttctgatgaataatttgagggaaagtctcctttccgacaccactctctcctgtaataagaacagataagtcggttggcgctacctggagcgcaacatcgatcgcacgatttaatccggggttattaccaataatcccaaaacgctgttttatctgttgtacatcaaccttcatcactctttcacttttaaaatctgtaattatttcagttactctgccaaaattacaaatcttaattcaaactaccactattgataacagattctatcggtcgtttcttattttttagcaccatatgtacgtttatacaagaactcggcaagatccttgtcttccgggatggcggcgatctcttccggcgagataggctcaccgatatatacatccgctttctttccacgcttattgaaagcctctgtaggaatacgcaaggtacgtatttgccagctgatattccctagccaatagaaaaaatgggtattttggaaatcaaaataaacagggtataccggtgctttcgccttacgaactaagcggatcacgctatgcgcccacgataaatcccgtacctgtttctcttttttattataaaatgagatcgctccagcagggaagaaacccatcggatgaccttctttcaagcgttgcagggatagtcgaacgccattgacattcgccggattcgcccctcgcttgtgggaatcgggcaccacggatatgaaattatcctccatcgccccgatcttggtcaagatgccattcaccatcaccttaaagtccggacggcgggaagcgaaaatatcaatcagcatgattccatccaacgacccgatcggatggttggaaacggtaacaaaagccccttccggcagatgatctaaaatctccttattatgaacctcatagctgagatcgataatggggtcatgcaataaagcggaagtaaactcagcgccccgtaaatgacaattccgggcatgtaccttattaaccagatccacacgtaagcactttatcagcaacttacctaaccatgtccccactcgccccttgaagaacggggccatctcttgcaaatcgtaaatgtcaacaacactcttcttcatactttatcctaaaaacgaggcacacatcttctcatgtttcctcatcactatcgctagtacgatgttcaacacgatgatctcgtataggtaataagcccagacctgtcccgttagtacgatcacaaacataaccatcgtccggccattaaaggtcaacaagtctatgtaacgcattaaatgacgactctgtttacgaaagtccacacggatattctccggaatattatccccatacttcgcgtgcaaattttgtaacatactctgtaaggtaggcgtagccttcacttgcaacatcgtataccaacgatataagaagtagaaaaacttgttaatgccatacttcatctccttatgtttcgcctccacctgctccaaagactgaaactccgagcctttatccttactgataaaataaaggtgaagcgtcttataataatccgtgatattcgcttggactaaatgagacagaccggataagaccgccaaggcaaagaaccaatccgtaccgtaatcatgagacaaacgaagagcgaatccgatatagatcgaagcgaaccagatatccccggcgaatccgtccaagatacgcccgatagcggacttgatccctgtaagacgtgccagctgcccatccacgcagtcgaggatattggcaaataccaacaataatataccgcagatattatatgtcaaattatcgtgataaaacataaatccgaccgccgcacccacgaagatcgagataaccgtaatcatattcggggtaatccctgtgcctcgcaacatacgagcaatacgaaatcctatcggacgataaaaaattcggtctatcttattttctgtttctatcgactttaacgatgcttcgtattccttatccaactcgctcatttgtttcttatttatacgagtaaccgccatccacaacgactacctcgccattaaaataactattctctatcaacattttataaacttccgccaattcatccgggtcgcagaaccgtcccaaagagaccttgttctctatattccgacggatctcggcaggctttgttttctgccattccgtatcgacaaaaccgggagccacggcattcacacgcagttcatagggaactaagaacttcactatgtttttgaccagcgcatgaacagcacttttcgtcaccccatatgccaaggataccgaatgaggctgtattcccatcaaggaacccgtaaacacgatacttccccccttattaatccgtccaacaatcttctgtaaaaggaagatcgggaaatggatattagcaaagaaaacccggtcccaatcctcgaatgaaagttcctcaaaaggatcccgacaggtcattcccgcattgaacacaaggccgtccaaacgtagcctattctcctccaagaaagaatcgataaccccgatcgtattccgatccgagatatcggcccgcagaatagaaacctgtatatcgaaacgccccaccaactcgctacgtacctcctcggcggtcgcttggtcggaagcataagtcagtataaggttatatccggcctttcctaaacaggacgctaccgcctttcctatcccttttgtcccaccggtaattaaaataaatttatccatgaaactgatcgttatttagcggcagatcctttcactgtttccggcttcgcctgacgttgggttgtcagattcgcctcataagaatcatgtatcgtttttttcagattcgaggaggaaacccccgttccgtaagggaaataaaatacctgaacgcctaaatctttcagatagtcgtactttccgaaccagtcatcacctaccacgaaagcgtcgatgttcagcttcttcacgatttccgtgtgatccaaggaatgttgtggaataacgatatcgggagtcttcaacgcctcgatgatctgcaaacgttcatggaacggaatgatcggcttcgctttataagaagagaccaactcatctgtactaaccccgacgatcaatatatccgccaaactacgggcgtaattgatcatcctaagatgattataatggaacatatcaaacgttccggatgtatatactatcgttttgtctttaaacataatcgtaattttcgttttaaaccgcaaacttacgcaaacttttcctatcttaaaagtttaaaaccaaaaagcgtcccacgccccatacaaaaatgtcatgtcaataacatccattcgttattaacatgacattttatgtatttattgaaacttgtcaggaaagatctactataatccgtccgtatcgtcgtctttcgtcaaatccaatttctcattatctccccccctatcgaaatattgcttacgcaacggattggcggtagcctcctgataacgcaaccggttccggtagatatccaacgccgcatataaggcttggcggaacgactcttccgaggccacgttctgcccggctatgtcataagcagttccgtgtgccggagaagtccgtacgatcggcaatcctgccgtatagttcaccccgtcatccatcgccaacgtcttgaaaggagcgagcccttgatcatgatacatcgctaagacaccatcaaatttatcatacatctgcgaaccaaagaaaccgtcagccgcataagggccaaatgacattacgccttttttctccgcctcttgcattgccggtatgataatcgtctcctcttccgtacccagcaatccggcatcacccgcatgagggtttaaggaaagaaccgcgatacgtggcttcacaataccgaagtcttgctttaacgactgattgaaaatacgcagcttgttcacgatatcgcccacattgatggaagacgcaacttgcgacaatggaatatgccccgtcaccaaagcgacacgaagatcatctttcatcaagatcatcaaggcttttttatccaagccaccgaagcatttctccaaatactcagtatgcccgggaaaatgaaaatcctcgttctggatattatgtttattgatcggggcggtaagcagtacatccactactccccgcttcatatccgtaaccgccgcttccaacgccttgaaagccgactcaccggcaaccggcgtagatttcgacaactccaccttggtctcgtcctccacgcagttaataatgttcacccggtttactcccgcatcctccgcatgtgaaataatattcatattgataggaggaagctccaatgccttccggtgataagcggctatcttggacgagccatagataatcggcgtgcaaagctccgccatgcgggtatcggaaaaggtctttaatatcacctcatagccgataccatttatatctccgtgggtgatccccactttaatcagtcgttcttccatatattttgtttgtttattactttttctcttttgggatatccaatgtctcagttaccggttcatcaaattcacccggcaaacgtaacgtaaataaggcagcttctattctacgcatgaaattacgcttgtctgtctccggagcatacacaaatccctcggctacaaccacacgatgattcttttcatccaagcgagtgtggcttacgaacgggcctcccatcatatcgccttgcattctccacaaaccgcgcatcacgccacaatatttaccatttaaggttattggcgtatactccactcccgcacgcgtttctgtttgcatataggaacccgggaacgaacccggcagattcgccttcaatacagaatctcgtttagcgaccagatattcctccgtaaacgtattcggatcagtataagggaaagtatatacgattaagtccatacggcctgtgttagcgttattggaagaccagaagaaatctgtcgtatccttatagtacgtgaagtttgccggagcgtttaacatcacgttcaggtcgcttttcaagttatccataaccaccatactatattccttttgtaattgctctatcgcacgattcatctccacctttacgaagaagttgaccaacgccttctcatgggtctttgaatactcgacgatcgactccgtattaggagctttcagcgaaacaaccacctgtcctctagcccagacattattctcgtagcctacagaaactttcgtataagcggtgggatctatcgtaaccactaatatattccttacataccgtaacagacctgtaaaatcctttggttgtacgtaggtaatcttcaaagaaggctcggcttgcggcagtccgggcaccgaagaggccaactcagactttatggcttctcccgcagggcctttccaatccttttgatccataaccacgacaacctcatatgcgaagcccgtagcttgagtcatcacagaacctgaattacatgctcccatcaaaacaagaagcagcaacataccgatgaataaagaacgtgttttcatacctgtgtgttttatattatacaaatgtaacatttttcgcggtagaaagcattccacaagcggcgaaaatatcctcccctcgtgatgcccttatcgtacatacaactcctttggcgtttaagaaatcccggaacgcctccattttagcgatatcggaagtctctaaagacacattcggtatcgcatgaaaacggatcaagtttacccgacaaggtattccacctaataaacaactcaaagcttcggcatgtttcaagctatcgttcaaatttttaaaaacaatgtactcaaaagagacacgtcgttgatgcgaaaaatcatattgtttgattaaatcgatcacctccctcgctgggaatgccttttcaaccggcatcaaggaaagacgttccataggatagggcgagtgcagacttacggccagatgacattcgctctcctctaaaaagcgtttcaagcctttcgtcacaccgatggttgaaaccgtgatacgcttcgggctccacgcatatccatacggggccgtgagtatttccaaaaccttgaaaagctcgtctacgttatccagtggctcccccattcccatgaaaacgatattcgtcaatgaatcgttttccggcaaagactggatctggttcaatatctggttcgctgtcaggtttgccgtgaagccttgttttcccgtcatacaaaacaagcaattcattttgcatccgacttgagaagagacgcaaagagtcgcccgatcatccgtaggaatataaacagactcaacaaaacgccccggtccggcagcatatagatatttgatcgtaccgtctttcgacttttgatactcagatggcggataagccccgatctcgaatgaatcctctaataaagcacgtttggctaccgctatattcgtcatctccgaaatccgggttattttcttcttataaatccaatcggccatttgcttagccgcatatgcgggaagacccacctcagacgctacacctttcagttcctccaaggtcatccctaataattgtcttttgtcaaccattctatcgatattttcttattcgcgaaagtacgagaaatattccacaaaataaagatcccctgttttgtcgtcaagatatatttattttgacggcaaaacaggggatcttttttatcttaagtataaatactctttattaatagaaacggatacggttgtcttccaccttagcgttgttgaccatagattggatagcttggaatcctacacgatacgcattcgaagcatccaacgcacggatttcctcagcctcgttgaactccttaccatctttatttcttgcgtatactttgaacacatatacaccgttgttacctttaaccggagcacttacttggtcaacttgagccatagaaaccatagcgttcaagttcggttcgataccgataccagcgatacggcgagtaccaaagttcacgaacttcacagagtctacagaagaacccatcgtttcagcatatgcctcaactgaagttaaattcttagcagccaattcctgagcgatcttatcgcctttcttctgggcagccaattcagctctcaaagccggagcgaccatatcaaccggacgatacccctcggaaatacttccttctacagcagccacgacaaatttatcactacactcgaagatctcagagatagaacctttatcgttctggaacgcccaacgaattaccggacgtgaattcttgatagaacctaacaactgatcatctgtagtaaccgttgcacctgaaatcaagttataaccggcttccttcgcattctcctccaatttagccatagagttgttcttagatacgaactgattcaactcattgtagatgttgctataggtcttagagctaggagatacagtcatgtcgatatctgcgatcttatatttttcaacatttcctgttttctctgttacttttacaaggtgagtaccatataaagatttcacaaccgctacctcattcaatggagttgagaagacagccttcttaaaatcatcattcacacctctcaaagcggtaacctctgtaaaccaacctagttcaccaccattctcggcagcttggtctgctgagtatttcttagctaattcagcgaaattagcgccacctttcaacgcccccatcaagctatcagccaaagctgttgtctcagcctcagatttaccggccaacatgatgtggctaacttttactgagtccggagcgaccgtcttatcgactagcttaaacattctgtatttgtcattctcgaatacaggaccataaacagcgccaacctcagaagtcgtagcgaattgtttcatctcaggatccaaagccttctccgtgaagaaagcgtcaacataaggaacctcagagttctcgtttactacatcagccactctttcagacgtagctagctcctctttcaagctctcgatctcggcctgtgccttatcataatcctctttactcggacggatatctacggcgatatatttaattaccttagattctttttgtttataaagctccttgcgttggttatacaatttctcgatctcgctcttgcttacctcaatcgttgaatccggaatcgtagcatatgattgcatagcgtaaatgatatccgaattctcggcattatcattataagcttccttagcgtccaatgaattcgcggaaatagccttactcaataatgtcgtatatttttgctccaaacgttgacgtttgatgttcttctcccagaacaaccagaagttcttagcttgaatcagctgtgcctgttgatctgccggatagctagcgatattatcggaatcgatttgtttcaagaaattcaacaaagcggccttatcaaaagcaccagtctgaggattcgtaaacatttgcatttgttggatcaacggagagatattctcaccttgaaccatatcaaacaattcttccggacttactcccatacctaatttagcagtagcctcgtccaacacgacctcttgtaccatcgcatcgaatacggactggcgaatctgtgtcatatattcctcgggcaggctggctgaaccggattgcatcttatacatctcggccatctcatcaacgcgaccttgataatcttgaatttttacaacctctccatcaatctcggcgatccgttcctgtgattgcctaaaataagtagaaccagagtttaaaaagtctccaatgataaaagcgaacaatgccaaacccaccacgagtaccagcagtcctgctttgcttctaattttttccagcgtagccatttatctttattattttttaaagtttattatttcacattttaagggcacaaagatatgaaaaaaaggaaattccacagcatataatccttttttttatcaaatccctactttcatacgtacaagttcgatcttcgtagccgttactttgattatcttaaacgaatatttatcgatctggacagtctcgttcaatttcgggaatttttgatagaagtgcaagataaaaccggcgatggtgacataatcatccgactcaggaagatccaacccgaacatttcgttcaaggtatcaatctccatcctacccgacagcaaatactcattgtccgatacttttttagccacatgcgacttcatatcgtgctcgtcctcaatctctccgaaaatctcctccaccaaatcctcaagtgtcacgatacccgacgtaccgccaaactcatccacgacaacagccaagctcttcttctcttgcatcagcagtttcatcagtttattcgctgccatcgtctccggaacgatcgatacgctacggatatgctgggtccaatcctccggattcttgaaaagctcggaagaatggatatatccgataatgttgtcaatattctcgttatacaccaatattttcgaaagtcctgtctcgataaacttagaacgcaattcctccatcgtagccgacgtatcacaggctacgatctccgtccggggcacgatacaatccctcaaacggacattcgagaagtctaaggcattctggaaaatcttaacctccgtatccatatccgaattttgaggtgcatcttccagactttgctgtataaaataatccaagtctaccttgcctaatgcctgaggtgaacttttcaagttcttcacgccccctaacttcaaaatcaaaaaagatagcagggaagagaacttggagaccggatacaggatgatatatataataaataatggtatcgcaaatatattgagtgataaattaggattcaacttaaatatggtcttgggaataaactccccggcaaacaagatcaagatcgtagatatcacggattggataaaaacgatcaatgcctcattcgcaaccaccttggctataaacggctccaatacgattgccatctgaagaccataaacgaccaacgcaatattatttcctaccaacatggtagagataaacaaatttggattacgatagaaaatacccagtatcttactggatagactacgttccttcttatccagctcgaaacgaagcttattggaggagataaaagcgatctccatcccggaaaagaatgcggaaaatgcgagggaaattaaaatataagtcagcgtccccaccttaattactttttattgaatctatttgtgacacatctccccgggcactatccccctgaactgtccgtgtcgtatcggccagagcatcgctcaccgggaaaataccttgtgagttaaatatcttatactgagtcatatcttggttcgactcaaagcctatgcctgttatgatcttatcttcttgctcgatacgcataaacttatcagaataaaccttctcctgcttctggtcccagaacaattgggaagtctcaaaatgctccccttgcagactttccacctctacattaccgatcagctcccaaagcccttttttatcataataataggctgtatccgccttaatactcgcttctgtctggaataaggtatcgaacttctccacgtagatcccctcggggaaataccaatggggttccgccgccttcccgtaaatctgccactctttcgctttcaagcgatatctcgtgataccagaatcggagatcaaggatgacacatccgtagccttcatcgtataagtcttgtccggatcaaactcaacatcaaccacctccttatgttccttactgcaagaggcagaaaacaaaagaagcataacaaccaccacgaaggtagttgttatgcccatattttccgttttacaatgaaaacgatttcctatcataattaccgaatcgttgtacgctctccgatccaaccaccgacagtgaaaggtttgcccttctccaaatccgggtgcatgaagatctcctccgtagaaggaaggtgagcacgataagatgatatcaaagtattagcctcttcagcaacactcggatctacctgtttcgctttctcaaatttatcgatagcggcattataagcagctcttgccaacactccatcattcgggaagacagatttagaagtagcggcatacatcttgccgatcaataaataagcattaccatagtttggatttacctccaaagctttctggcaatattgtctagccttcgaataagcattttgctcaaacagcaacaatgcgatcatataataatcatcagcttttgaagtcgcgtccgtttctaaattcgcggcctcatcaaagtatttaatagccgtatcataatcctttatcttaacggctttctttcctagcccaacagctgcctcggcactaggttcttgacgataagcatagtctgatgccaaaaagtaagcctcgatttcttggcaacctgttcttctcaacaaagatatagtctctttcaaataaggtaagttatccttattctcctcgatcttagcagcatacaaattctgcaaagtctcgcaatcggcagcaccactatttgcaaaggcattatcaacaccactcttatatgcggtcaaggcattcacttctttttgattgtttgcagcctgcgcagcttttaactgagcatccaagccagcagaaaccttcaaataatcttgaatatactgctctttgaagttcggatcgttaagcattttcttcatagaagagaaactaaacaaggagagacctagagcctccgtatcagcacctttctcatcaacgatctccttcaaccaagtataggcctgattatagtcggcattatcgcctgtttgcgctaaataatcttgcacttttcgagcaacgatccagtcttttccataccggcgatcatttccaaaatatttcacacgcttgtcgtaaacccccatcaaatcatcaataagagcattcttcttagcgggatctttctcttgggcgatcttccagcccataattttcacaccgtacaaatagatatcttttgtagcggcaggacactcatcgtacacgatcttccagaaatcataggcatctttgaagtttccggctttcgcgtaaggaacgaacaagctgatattggtaatacaacgcacgctatcctcaccggaaccgaactgtgtaccattatctactcctttctgcgcataagcacccaatgtacccatagtacatccaagcgctagtaataaaactttgatcttcatatctctttctattaaagttagctataaatttatattccttcaaaaaagtatcatactcattagaccctttcggccattcccggtttaatccacttttcgtttaaaaaaccataattcattaaatgtatagttcaccgtaaaccggaaatactgctcatcaatcattgtacgtaattccggacggatcttcacgtattcaaatgacaggttcactaatgaacggttatcgatcaatggaagcccaaaaccgatactcgccccatattcattataaccatgtcctttataaccattctcctcggagcgactgactcttaagtacgaattgctataatgaaaaccggcacggtatctgatacgtcccagataattacgattatcataacgaggaataaattcggcaccagccgctacacgtgtacgattcttgaattgacctttctcgttatcaaaataagcgttcgcccagtcctcatataagaagtccgcagctaacgtcaaccggttctccttcacataagagatacccgctccataagagtttggcatatcaaaccgataattcttaattgtatcgttccttgtatatccggatgtagccgaagaaccgacaagttgagtatcatacacagtcgtattcagctttttcccaggagaataaacgaaacctaccgtgacatgctccgtcttgctcaaaggatgcgtatattgaataccaaaatctaactttaaatcacgaatctcataacgttggtttctatacacatcgtccgcccctgtcgaactcgggaaaatcaagttgcgggaatgtgttatatttccaaataaaaatccggcgttcaaaccaatggaaagacgcttcttccaaatatcataggagagccctaaataggcatcgcttaagccaccttcgccactaaagctttctccccaacttaaaccgccctcagtacggctctcgccgaaatcatatcctacatatgaataaggtaataaaccaatactcatcgctaaacgccgggtgatcggaaattgcatagcgatatactccacgtttccattcatctgtcgttgcttattcgtaccgtcatagaaccaagacacctgaccggacgcaccaaaatcaaaaaggaatgtcaacgaatccatacaactataagatgctggatttaatggatttatctgtttagaggaccttaatccataaccgactccacccatcgcccttccggcaccaaaagatcgatccgccaactctccatatccaaatcgcgtataaggcgagttcgtgttattttgagcccacaatggcaattgtgtaaagataagaaaacttattattactaccttattaattttcaacattatactctaagattctgtttaatcctgtcaacactaaattaatgtctgcaaagatggagttttttagccgtctttcaaaataaaacgaatgaccgcctgttaaaaaaaccaaaagatccggatattttactttcagctcgtcaatatatccgtccatctcgtaaacaatcccattcaccacacccgcttggatagccgtttccgtacttctcccgataagcggtatatcatcctcttccgttaccaaaggcagtttcttcgtaaaatggttcaacgctcgaaaacgggttgtcatccccggagagatattccctcccagaaagatacccggcgcttctatcacctcatacgtgatagcggtaccggcatcgataaccagcagattttttcccggccgcaaataattcgcccccacgacagcggccaaacggtccttgcctagcgttttcggcgtcccatattccaccttgatcggtaaagctacgtgttcatccagaaagacaaaacgctgaagcttattttttagataagcgatcaactcatcgtccgtatctatcaccgtcgataaaatgccttgcgtaaaagcgtacttctcaaaaagagcagcgaccacagatacaccgaattgcttgtatacaaaagaagcctctatatgcccatttttatacacagcgacctttgatgacgtgttaccttgttctataataagattcacttctctgatattttccgcaaagaaaaacaaaaatgatgaaataacacgcaaaaacatcgtataacctctaaaattcttcttgaacaaaaaggatcgcatctctgtttgaagaaaaatctaaataaaaaacaagttatgaattacgggattagtgtcttattcagggcgattccattgctaatggccctcttttgtttcggttatggattttttgtctttaactatggagtggactccagcagattcgtcgccggacctgtcgtattctctcttggctttatttgtatagccttgttcgctacggcagcgaccattattcgtcaaattatccatacatataataatgtagccagattcgccttgcctatccttggatatctctcggcaaccatcacttttctggcgggctttatcttactcatgtcctcaccggcgccagcagactttgtcgcgggccatgtcatttgcggggtgggccttataaccgcatgcgtagcaacaacggctaccgcctctacccgattcaccttaatacaaatgaacgccaaaagcgacgatcccagaataccagacaaagcgttcaacttttggcagggggtattcttgatccttgtagcatcatttatatccatagtcgcatggatttgggcttaccggttgctagcgcatagcgacgagcattcccaatactttgtcgccgggcatgtgatggccggactagcatgtatttgcagcagcttaatcgctttagtcgccacgatcgcccgacaaataagaaacacatattcccgattggaaaaaaggctatggcaccgttttgtcatcctgatgggatctatcagtctgatatggggcctcttcgtattaggagatagcgacccggctaatgcctcaaccggatatatcatgatcggccttggattagtttgctatagtatctccagcaaggtgatcttgctgtctaaaatatggagggaagaattcaagcttgccaaccggattccattaattcctatattcacggctttattctgccttttcctctccgctttccttttcgagatggcggccgagcatagttattatgccattcccgcacgggtattggctggactgggagcgatctgctttacgttgttctccatcgtcagcatattggaaagcggaacctcttccaagtaaactgttttttcatcgtgatgaaaatactttttcttcacggtgaaaatactttttcttcatgatgaaaatattttttcctcacaatgaaaaaatcaacattctttgataaaccatcggccacaacacataaaacattctttaacactaccaaaagcataaggttttcaattctttataaacaattatcatcccaagagtaagaaaacgcttgcaaagtaaaaaataatatctacttttgcacccgggtaagtcctacacggcatgctccctcggaatcccccagggcttgaccgcagcaagggtacttggtcgtagcggcgcgatgtagtaagcttacccacctgcctctttagctcagttggccagagcacgtgatttgtaatctcggggtcgttggttcgaatccgacaagaggctcagataagacacatcttaaagaaggaagcttataagtaggcttcctttttcgcattttaggcataatatagttgcgcatttgcattaatatattaattttgctgataagaattcaaaactgcagcatcatggaagagaataagaatttacttttaaaaggcgctatgacttatggtttggccatgggtatatattgggtagtgaaatacatctttttcatcttcagcgtttccgtcccctccttaagtcttgtctattggctattgacgctcgccgtccctttcatcgcctactacatgacgaaaagatatcggcacgacatcggtggaaggatcagtttctttcatgcatggagattcggcacgatgttgtattttttcgccgcattgatcgtctcgcttgaatactttgtcttttatcagttcatcgccccgcctgatttcgtggcaaatgcgatcgggcaattaacgactgtactaaaggatagccaagtcagctcggagatgatcgactcgctcagcaagattcgtatctcgccaatccacatggccatacaaggaatatttaataacgtattttacggcatcatactttctataccggtagcggctctcttgtgcaggaacaattcgacaggttccatcactgaaaaccgctaaaaagttaattacagacaaataatggacatatcagttgttatcccgttgtataacgaagccgagtctttacccgagttattctcgtggatagagcgggtgatgaaagaacataattatacctatgaagtcattttcgtgaatgacggcagtacggataattcttgggaagtgatcgaggagttgaagcaacgttctccacacgtccggggaatcaagttccgtcgcaactacggtaagtcgccgggattgcattgcggattccaacgggctaaaggtgacgtggtcattaccatggacgccgatctgcaggacagcccggatgagatacccgaactttaccggatgatcaccgaagacgggtacgatctggtatccggctggaaaaagaaaagatatgacccgttgtctaagacgatccccacgaaattattcaacgcgacagctcgtaaattctcgggaataaagaacttacacgatttcaattgcggattgaaagcgtataagaatgttgtcattaaaaatatagaggtgtataacgatatgcaccgttacataccttatttagctaagattgccggatttcacaagattggcgagaaagtagtgaaacatcaagcccgcaagtacggaaccactaaattcgggttggatcgcttcgtgaacggttatcttgatttgatcacgctttggtttacttccaaattcggaaagaaaccgatgcacttcttcggtttatggggaagcgctatgttcttcattggttttatcgctctagtaatcgtactcagcatgaaattgatctcgatgtactctggagatctaagacctttggttacaagttccccttatttctatatttcattgacagcgatgattctgggaacccagatgttcctagcgggctttatcggggagttgatttcccgcaattctccgaatcgcaataactataaaatagaggatgagatatgagtttcctagaattagcgagaaaacgttgttctatccgaaagtatgcccccaaaaatgtggagcaagaaaagattgattatatcctagaagcagctcgtttggccccttcggcggtaaattatcaaccttggtattttgtatgggttcaaagcgcggaaggaaaagctaaattacaagaatgctatccccgggaatggttcaagcaagcgccttattacttgatcgtttgcggagatcatcagcaatcttggaaacggggcgatcataaggatcatatggatatcgatacggctatcgccacggaacacatttgtttagccgctgccgaacaaggattgggtacttgttgggtttgcaatttcgacacggagctttgccgtaaacattttaaaattccggaaacgatcgagcctgttgtactgataccgttcggctatccttccgacccggcattattcgatgagactccaaagaaacgtaagcccatagaagaaattattaaacgggaatcattctagtatgttatacattgaagttctgctactagcgatcggcttatccatggatagcctagcagtatcagttaccggcggcgcagttcttaagaacaactgcaccgccggtaatattattaagatagcgagcgtgctcggtatattccaagccggaatgaccgtgattggttatacgatgggattaggattcgaaaaatacatttgcgccttcgatcattggatcgcatttaccctcttgctttacttaggtggaaaaatgatatacgatagcacgaaggaagaggaggaagacgggaaattcgatcctctatgtaaccggacattatgcggattgggaatagcgacaagtatcgatgccctcgccgtaggaatctctctggcgatcttaaaatcaccactcttgctgcaagcctcgactatcggtgttgtcaccttcgctatctctgccttcggtgtctatttcggtaaccgattcggcaagagaatcgacttgaagctggacctcatcggaggtttaatcttaatcggtatcggtacaaaaattttaatagagcatttattctttagctagggataccttattgaataaataaccttatacattaattaatagacatgaaaagccagcaattacgaaaactagcgccggagctggattcactccggctaggcagcggttggaaaatcgacgaattgagtaaaccgcaaatcattgtagaaagcagttacggacatagccatccgggaagcgcccatctggataaattggtggacgaggccggaatcggtataaaggaaaaggggggacgtgccgcaaactacttcgtcaccgatatttgtgatggagaggcgcagggacacgatggtatgaactactcattagtctcccgtgatatcatggccgccatgatggaaattcatgtaaaagcgactcctttcgacgctggtgtctttatagccagttgcgacaaatccgtccctgcgcatttgatggcgatagcccggctagatatgcctgctatattcatgcccggtggtataatgaaagccggtcccaacctactcacgttagaacaaatcggtacctatagcgcccaatacgagcgaaaggaaataacggaagaacaattcatggtttataagcgtgacgcatgtccggattgtggagcttgttctttcatgggcactgcctctacgatgcaagtaatggcagaagcgctaggcatcgctttaccgggttccgccttgatccccgcccatttacccgagttaaaagaaaccgcccgtaaagccggagaacatgcgctcggactggcgagagaagagttaaaaccctccgatatcatgacgatacaagcgtttgaaaatgcgatcatggtacatgccgccatagcgggttccagcaacagcctgcttcatcttccagctatcgcccatgaactgggaatccagttatcaccggatttgttcgacaagatacatcgtaagatcccctaccttttaaatatacgtcccagcggtttttggcccggcgaatacttctggtatgcgggaggcgtaccggcgatcatggaagaaatcaaggaattcctccatctcgatgtcaagaccgttaccggcagaacattgggagaaaacttaaaagatttacagctcaacggcttctatgagaattgccataaatatcttcctgccctaggagtaaaggttggcgatattatcaaacctcttcatacaccgatcaaggcacaaggagccatcgctatattgaaaggaaatttagcgcccgaaggggcagtcgtaaaacattcggcgatttcaccccgcttgatgcaagtcaccctgaaagcgagggtattcgattgtgaggagaacgctattgaggcggtattacaaaagaaaatccatccgggagaagcggtatttatccgttatgaaggaccgaaaggaagtggaatgccagaaatgttttatacgacagaagcgatcgcctccgatcctgagttggtagagaccatcgcattgatcaccgacggtcgtttctccggagcgacccgaggcccggcgatcggacatgtatccccggaggcttccgaggggggaccgatcgccttggtagagaacgatgacttgatccgtatcgatattccagcgagaagattggatataatcggtaccggcggtatcgagagaagcgcggaagaaatagaaaagatcctatccgaaaggcgtgcacattggataaaaccagagtcacaatataaaaaaggaatccttgatatttatacacacaatagcgtctcccccatgaaaggggcatatatggaattttttatgtaagttcgcgacataaaatttcataatgatgcgcaagaatatttccatattagtcagcctgttgatcttatcgcttacggcttgctcggacaagggccaatatttcgaagagagtggttctgtttttcatacaagttaccacatcaaatacaaggccaagcaaatcctaaccgataagatcgacagcgagctgcaacgttttaacctctccttaaatcctttcaaccccaactccacgatcgctaaagtcaataataacgaggatgtggaggtagatgaatggtttaccgaagtattcattaaggcggaagaaatctccaaaaaatcaggaggagcttttgatattacttgcgctccattaattaatctatggggattcggattcagtaagatggacagcgtaaccccgcagatgatcgatagcatcaaggctttcgtcggttatcaaaaagtaagattggaaggaaagaaaatcatcaaagaagatccccggattctattgaattgttcgtccatcgcaaaaggttatgcttgcgatgttatcgcccgcctgctggaaaaggaaggcgtaaagaactacatggtagaaataggtggtgaggtcaccatgaaaggcgtaaatcaacaaggtgactgttggcgagtcggcatcaacaagccggaaatagggacaagtggcgtaacaaatgatgttgaagagatcgtacaattatgcccaaaagggggtgtggctacttctggtgactaccgaaacttctacatcaaggatggtaagaaatatgcccatacgatcaatccggcgaccggttatcccgctggacaaaatatccttagtgcgacaatcgtggcggaagattgtatgacagcagacgcttacgctacgactttcatggttttgggagtcgagaaagcgaagctactggcacaatccatccccaaaatagagtatttcattatttatgcggacaacaacggacaacagaaagtcacctactcaaaaggtatgttggaataccttcctaacagaaaaacattggctatcctcgaaaatccttaagttcctacatgaagcgttatctaaatcaacttgaatgcaaaatactgagagccggagattccctgtttaattccacaaccacggataacctattaatcttcgtattttcgggaaaacttattatttacagccaagaagggacacatatagcggaagtggcaaaagatcatttcatgctacttgcgcaaaacaccaatcataaggttatagcctcagcccctacccgccttatcttaatacatgcgggcagtctatccgacatgatcataaatgacccggaatggaatgtggagaaaccggtcgtcttaccgattcccccagccttagcgcacacattaaatcagatagaatattatatgaaggataaatactttaccttgaattgagattaaaaatgtttcaattcctgataaagcttttgcacaggtaatcccatcacgttataaaaactaccattgatagcctctaccccgatataaccgatccactcctgaatgccataccctcccgctttatcataaggtttatatttatccaaataataattaatctcttcatcacccaatttagcgaaacaaaccgcagattcgacggaaaagcctacatttttgtccttcgtcatgatacaaacaccggttattacctgatgtacatgatccgacaaagcatgaagcatagcataagcttcctctcgattcgcaggctttcccataaccccgtcaaacgtccaaacgatcgtatctgccgtgattagcaattcatcatccgccatagtcggtttataggcctccgctttcgaacgggcaatatataaagggatctccatggagtcaatagaatccgggtaagactcgtcaatatccgaaattaccctcacctcgaagtcgatatccagaccagataacaaattccgtcgtctcggagaattagaggctaagacgatcttgtacttttttaaattctctaacataacctattcgattaagcgttacacattcaccaaaattttaccacccaaaagcctcctcgccgaaccagtgtccttgcgcccgcatcgtttgctcgatcacgtccctagctacgccttcgccacctcgccgggaggatatatatttcgctatctccttgatctccggagccgcatccgcaggtgccaccggcaatccgactcgcgtcattacctcataatcaggaatatcatcacccgcatacatgatgtgctcaggagacaagcccgttttttccatgaaatccttaaagtcatgcacctttacagcgctacgcatataaatatgttgtattcctaaacgagaaaagcgaatctgtacggcttccgtatatccgcccgtaattatagcgacctcataacctttcttcacggccaattgcaaggcatagccatccttgatattgacagtacgcatcggatcgccattcgggtgaagcggaatcacatcgcaggatagcaccccgtctacatcaaagacaaaagcctttatttttctcaaatcatagtttatactactcatgtcgagcctccttatgtatacttcggctaatcagctcatatagatttcgcatatccggatctttaagcatagccatatgtttgtttatcacattctcgtcatatcgtatagctggtcccgtttgggctcgcaccggcgacattacatgtaccttagcggctgtctcgtctatcaaaggtagcaagacctctcccggtatttgctgttcttccaagatcttttcagctagcgcatacatatgattcgtaaaattacaagcgaaaaccgccgctaaatgtaagttctttcgcttctcggaggagaggaaacggacatcactggagagcgccctagccacctcgcccagcaccttctcatcttcagacgagttcgcctctaaaaagaacggtattttcttgaaatccacttccctactcttactaaacgtttgtaacggataaaccaccccatatctagccgtaagaccttcaaatacagagattggcatactccctgccgtatgcacccacaaaccgttattcggttttacacgggcgataacatcttggagcacggcatctttcaaagagaaaacatacaagtcggcatcttccacaatatcttccgggacaacagtccacccacatcccaattcatcggctaaaatcttagcatgctcacttgtgtgactatacacttgcccgatactcattccggacttacgcatttccaacgaaagccgggtagctaagtttccggcaccaacaaatacgactctcattcttccgcctctttattttcttccggaagagagaactttcctatatgtatcttctcccattgtaaatgggattcatcaaaaggcttacgaacctgatccttataaccgataccaatgatagacaagacatccaattgataagggatatccagcaacgaacgaacataattattcgaatccgcctcgtcctctgttacccggttccggatctgacaccagcaactgcccaatcccaaatcctccgcttgcaattgcatataaatagaagcgaccgaagcgtcctcgatccaaacatcgctttccatcacattcgccaagacaaccacggccaaggcacaaccctccagaaaagcagaaccatttttcttacacccggcaagtttcttcaacatttccttatcttccacgaccacgaactgccaaggattactacgttttgaggccggagccatcaacgccgctttcaagatcagttctacctgctcgggtgaaagtagttgttcggtaaacttacgtgtacttcttctattttgtataagtgttgcaaaactctccatttttttcgttctttgtactcttttaatattaagattcgcaaatataaatataattttttgcacccatatatacgtatcgttcttttttctcgttagtatttttataattgaacaatagattatgaagattcgtgcgatagccgcgctgctatttatacttatttccgtgagtgcctttggcgaaggccgcataaaaatcactggttatgtccgtgacgccgacggtaaccctctggaattagtgaatgtccgggttaagaacacgttgatcggctccatgaccaacgagaagggatattattccttttccatatcgccgggggattctatctccgttatttactcttgtctgggatataataaagctgaacgtatcattccttcggcacaagccgatatgcgcctgaacgtacagatgaacaatacctcatttgatttaggggaagtatctgttactgccatccgcaaacagaccacgaccatggagtccctaaatgcggacaaaatcaagttattgcccgatccctccggaggtagtatagagagcttggtcgttacgtttgccggagtatcgtccaataacgagttaagttcccagtattccgtacgtggaggtagttatgatgaaaatatcgtttatgtgaatgggatcgaggtattccgtccgcttctgattcgctcgggacaacaagagggccttagctttatcaatccggacctgacagaggcggtcaatttcgccgccggtggcttcgaggcccgttacggagacaagatgagttccgtgctggatattacctataaaaagcctaagatattcgaaggctcagcttctgcgagcttgttgggtgcgaatgcttatgtaggcagttctatcggtaaatttacccaagtaacgggtttccgctttaaaagcggtcggtctattttgggtaccatggatacagacgcagaatacgaccctaaatttatcgatctgcaaacttacatcacgtaccaattggcccctaaatgggaaatcaatttcttgggaaacctcgctaacaataattataaattcaccccttatagtcgggaaacctctttcggtacagccgagcatcccaagaacttcaaagtctatttcgacggaagggaaagagaccgtttccaaaccttattcggtgcgcttacattgaaacacaatcccaatgagaacacagagttgggacttcaagcctccgctttcaaaagcaaggaagaagagggatacgatattgccggagaatattggctgagcgagaacggagcggaaaatccggatgacgatgcgtcagccgccatgtccgtaggccgttatcacgagcacgcacgaaaccgtttgaactccaccgtcatgaatgtcgggcattatgggatggcccgccttttaaacaatacgttgaaatggggagccacggtacaaatggagaaaatcaatgataagatcagtgaatgggaaaaaagggattcctcaggttattctttgccccaaaccggtaataacgtaagtgtatattcgaacctcttttctgataatcagatagaaagcacacgcttttccgcttatgcgcaagacgcgttcaaattcaggaccaagcaaggtctgttcacgttagtcgcaggggttagaggtagttattggacttataataaggagttccttttcagtccccgtgcctcattgggctttatcccgaacttcgaccaagacttgacgctccgtttcgccaccggactgtattatcaatcgcccttctacaaggaattacgtaaagtagacaaagacgagaacggcaataatatcacggtattgaacaaagatctaaagtcacaacgctccatccatttcatattgggaggagattatacgttccgtgccgtagaccggaatttcaaggtgaccgccgagatgtactataaaaagctggacaatctgaacccctacaccgtagataacgtcaagatccgctattacggcgagaactgcgccaaaggttacgccatgggactcgatgtcaaattcttcggagaattcgtaccgggtaccgactcatggatcagcttctccttgatgaaagcccagcaaaccatccgggaaacaacgaccgtacctatggccaatagccaaggctacaacatctcacttttcttccaagattatttcccgggctataaacgagtcaagctaaatctgaaaggagttctatccggaggacttccccaaacaatcccgggcaaaggatacgaagccggctatttccgtacgcccgcctacaaacgtgtggatatcggcctctcctatcaattggcaggaggcacggacgctatcatggacaggggcttcttccgccatttgaaaaacatttggctaggtctggatgtatttaacatattagacatcaaaaacgttagttcctactattggataacagatgtatataatgtccaatacgcagttccaaactatctgaccggacgtcaattgaacgttcgtctgattgtcgatttttaataaaatgtatctttaaacacatttactggaagataaaaacaaaaaattatttcctcattcataaaaagtagtgtacatttgcacacaatagaaacaaacatttactaaatctttaaattattattgacatggaacttacacatatcgaacatttaggtatcgcagtgaagagtatcgaggcttgtttaccctattatgaaggcgttcttggattaaaatgctacaatatcgaagtagtagcagaccaaaaagtaaaaaccgcatttttcaaggtaggacagactaaaattgaattactagagccgaccagcgaagatagcacgatcgcgaaatttatcgagaaaaaaggtgaaggtatccaccatatcgcattcgcggtacctgatgtacaggcagctttgaacgaggctgaggaaaaaggcgttaaattaatcgataaagctccccgtggtggcgcggaaggcttgaacatcgctttccttcacccgaaatcaacttgcagcgtattgacagaactttgcatgccgggcaacaaataattaatccgttcatttctaacaacaaatcaaaatacaatgagtaaccagcttgaaaaagtaaaagagctcatcgcacttcgtgagcaagctcgcttgggtggaggagagaaaagaatcgaatcacagcacaaaaaaggcaaatataccgctcgtgagcgtatcgccatgttgcttgacgaaggtagtttcgaggaattcgacatgtttgttcaacaccgttgtacaaacttcggtatcgagaaaactaaatatttaggcgatggtatcgtaacaggttatggtacgatcgacggacgtttggtatatatcttcgctcaagatttcaccgtattcggtggagccttgtctgaggctttggctatgaagatctgtaaagtaatggatcaagccatgaagatgggcgctcccgttatcggtttgaacgactccggcggagctcgtatccaagaaggtgtaaacgccttggcaggatatgcggagattttccaacgtaacatcttggcatctggtgttgttccccagatttccggtatcttcggcccttgcgccggtggagccgtttattctccggctttgacagacttcaacatcatgacacgtggtaccagctacatgttcttgacaggtccgaaagtagtaaaaaccgtaacaggtgaggatgtaacccaagagcagttgggtggagccagcgtacacactacaaaatcaggtgtagcccatttcgctgttgatacagaagaggatggtttgcaattgattcgtaaattgctcagtttcttacctcagaacaacttagaggaaacgccgttagttgagtgtaaagacccgatcgatcgtctggatgatgtattgaacgatatcattcccgataacgctaaccaatcttacgatatgtatgaggttatcggtacgatcgtcgataacaacgagttcctagaggtccatgcggactacgctaagaatatcatcgtaggtttcgctcgtttcaacggacaatctgtcggtatcgtagccaaccagccgaaggttatggcaggatgcttggatagcaacgcatctcgtaaagcaggtcgcttcgttcgtttctgcgacgctttcaatattcctttggtaacattggttgacgttccgggattccttccgggtacaggtcaggaatacaacggtgtaatccttcatggcgctaaattgctttacgcttatggtgaggctaccgttcctaagattaccgttacattgcgtaagtcttacggtggagcttattgcgtgatgagttctaaacatttacgtggtgatatgaattacgcatggccgacagccgagatcgccgttatgggcccgagcggtgccgtagaggttatcttcgccaaggaagtagcagccgctgaagatccgaaagcatgcgcagcagagaaagaagctgaatataagaaagcattcgctaatccttataacgcagctcaatacggttatatcgacgatgttatcgaaccgcgtaacactcgtttccgtattattcgtgctttgcagcaattgcagactaagaagttaagcaatcctgctaagaaacatgataacctgcctctataatccgtaaaacaggagatgaatatgataaataagaaaataggggtattgctactgttcgctttgctcatttcattcggggcaaaggcacagcgcgcaacctccatgcgtattaatgaagtattggttatcaacgaggataacttcgttgacgactatggcaaacgtcatggctggattgagttgttcaacacttcggccggaacggtaaatatcgcgggatgttatttgacagacgacaaaaacaatcccatgaaatatccgatcccgaagggagacgtattaactcagatccaaccccgccagcacacactattttgggctgacggacagccgggcagaggtacattccacgttaacttcgtattagatccctctaaggagaattatgttgccttatatgacgccgacggtaagaccttgatcgatgagatcacaattccggcaggccaattagcagacattagctacggtagagtgattgatggcgaaaaagactgggcacagttaaagaaagtcactcccagtacgaacaacttgacgttggactccaatgagaaaatcgataacttcagggttaatgactctttaggtatcggtatgactatcacggctatggctgttgtattcttaggtctgttcttgttgtacatcatctttaagcagattggtaaattatctatcgccgctagcaaacgtaacgtagagaaggccgtaggttctgcttcagttaccgcagacgcaggacaagaatctggagagatattcgccgccatcgctaccgctctatacgaaatgagcgatgataatcacgatatcgagaacacggttctcactatacgtaaggtacaacgagcttattctccttggagttcaaaactctatggcttacgtcaaactcctcaaaagtaattatctaaaaacgaactaaagaatgaaaagttttaaatataccattaacggtaacgtatataaagtacacatcaattctgtagtggatgatatcgcagaacttgaagtaaacggaactccctaccaagttaagatggagaaaccggcaaagaaacaaatggttacattgaaacgcccagctcaagccccgactacggcaagtggagaccctgttgtttcccgtccggcggcttctacgacacaaggggctgttaagactccgctaccaggtgttatcttgcaggttaagtgcaacgtaggtgataccgtgaagagaggtcaaaccttgattatccttgaggctatgaagatggagaacaacatcaacgcagaccgtgacggtaagattatagaaattaaagtacacaagggagactctgtgctagaaggtgctgatctcgtagtaatcggataagactatgcaagagagctttttaacattcttaggtgagaacttacaactgttccttacctatacaggtgtatacaacgctactccgggacatctcatcatgattctggtaggtctgttgtttatattcctggcgattaaatatgagtttgaaccgatgcttttgatccctatcggattcggtatcttgatcggtaatatccctttcaaggacgcaggtcttcaagtaggtatttatgagcaagggtctgtactgaacatcctctatcagggtgtgacctctggatggtatccgccattgatcttcctcggcatcggggccatgaccgacttctccgcattgatctccaatccaaagttgatgttgatcggtgcagcggctcagttcggtatctttggtgcttatacgattgctcttcaaatgggatttgagccgaaccaagcaggtgctatcggtattatcggtggtgctgacggtccgacggctatcttcctttcttctaagttagcgccaaacttaatgggtgcgattgcggtatccgcctactcatacatggcgttggttcctattatccaaccaccgttcatgagattgcttacgactaagaaagagcgtttgatccgtatgaaaccgccgagagccgtttcttccacggaaaaaattatcttcccgatcgttggcttgttgcttacttgcttcttggttccgtccggtttaccattgttaggtatgctattcttcggaaacttattgaaagaaagtggcgtgactcgtcgtttggcagagactgctcgtggtccgctgatcgatacaatcacgatcttattgggtatcacggtaggtgcttctacccaagctacacagttcttgacattgaactctatcaagatcttcggtctaggtgcgttatcattcgtgatcgctacttgcgccggtgtattgttcgttaagttattcaatttaatattgaaagacggcaataagatcaatccgcttatcggtaacgccggtgtatctgctgttcccgactcagctcgtatctctcaagtcgtaggtttggaatacgacccgaccaattacttgttgatgcacgctatgggtccgaacgtagcaggtgtaatcggttccgctgtagctgccggtatcttgctaggattccttggttaataaaacaactatctatattaaaaaaggcgaggtccgaaaggatcccgcctttttatgttattgttctcagttagtttgctctataggaaccggagtaatctccgtactcgtatcctccaccaacgttgtcccgaggaacaaccagatcatcaaaaggattatagcgacaaccacaccaaataccaatagcgtattcacacttttctttctcatgtctttaactgatttattcattttagaataaacagccggaacatgaatttggttgtgtacccttactcttatttgtttttccctaacgcctcgttcagcactttattcttagcgatcgttgcttggaattctttcaaatagaaaggctcaaaataagccacattctcaaaacggccatcatcatatgctttctgcgacaaggatgccatatttacagctaatggatagataccatctataaaacaggcgttcggagaagtgattaccgtctcacatttagcggcaccgtctccaaagaaacaaaccttaccgttctctaaaaaagaagcatacgaatcagcatctacgatatcagcagtcgtagcacgtatcgtgttgagatgggaatcataaatcgaagagtagacttccatacggcgggcatccaacatagcgcaatacaagcaatcggcctcctccttatttttccggatagcggcagacgctaaaatatccagcgtatgaataccgatcaaaggaataccatacccaaagcataatcctttagccacagacaccccgatgcgtaaccccgtataagatccgggtccgctacttaccgccacggcatccagtttcatccctttcaacttcgcggcctctaatgcctcttccatataaacgcccaataacgccgcatgagacggcccctcaaaggaagccttctcaaagaccacctcctccccttccgacagggctactgaacatacggaagtggatgtctcgatatttaagatcaatgacataataattaactattaacaattgataattgaacgaacaaacaatctcaatccttcaatctgattaggttgcgaaggtatacaaaaattcattatactatcaaggcagccctatgagaaacatctatttatgaaaaaataaacatcaaatctaaaaggaaaccactatctttgcgcaaacttttgagaaaaatgatacaatcaatgactgggttcggtaaggttactgccgagctcccttcaaaaaaagtaaccgtagagataaaggctttaaacagtaagcaattggatttgtccacccgtatcccttccatatacaaggataaggaaatggagcttcggagcctgttacttcaatctttggagcggggaaaagttgagttcaatatctttatagaatatataggcaaagatactcctacacagatcaatcttgccgccgtagagaattattacaaccaaatcaaggagatcgcagagaaactgaatatcagcgttccgaacgattggttccagaccttgctccggatgccggacgcaatcaagtccgagaccgtagaaccggacgaatccgaatggggggtggttttagaaacggtaaaggacgctatcaagcacctgtgtgatttccgtatccaagaaggagccatgcttcaaaagctttttgagcaaaagatagccaatatcgccactctgttgaaagaagtggagaaatacgagggggaacgtatcgagaagatcaaggctcgtatcatggataacctgcaaaagatagccgagaaggactatgacaagaatcgtttcgagcaggagatgatctattacatcgagaagctggatgtcaacgaggaaaagaaccgtttggacaaccacttgaaatattttatctcaaccatggaatccggtcacggccaaggcaagaagctcggttttatcgctcaggaaatggggcgtgagatcaatacgctcggatcaaagagcaaccacgccgagatgcagaagatcgtggtccagatgaaagacgagttggaacaaatcaaggaacaggtactaaacgtattataataagattaacgagaatggctggcaaattaattatcttctccgcaccctcgggttccggaaaatcaaccattattaattatcttttgaaacaagatttacaccttcgcttctccatctcggctaccagccgggctccgcggggaaccgagaagaatggtgtggaatattatttccttacgccggaagagttccgcagtcgtatcgctaatggagacttcttggaatatgaggaggtgtataccgataaatattacggtacgttaaagagcgaggtagagcgtatcttgaacgaaggggataacgtgattttcgatgtggatgtggtaggcggatgcaatatcaagaaattctatggagaccgtgccctgtctgtctttatccaacctccttgcatcgatgacctacggaagcgattggaaggacggggaacagacagcccggaagttatcgaaagccgtatcgccaaggctgagtatgaattagggttcacgggacagtttgataaggttgtcgtaaacgatgatctggagactgcccaaaaagacgcgttgaagatcattcgtgagttcttaaacaaatagtctatgtctaatatattcaagaatacccgttttatgatggggctttctatcgtttgtgggatagcgagcctcgtattaggtggtattagcctgtattataaggagtatatcatcgggggtgccctgatatttaatatattcatttgtttcatcaactataagggttggcaaaagaagggttaagtaaaaatcgtatgggactcaagaccgggatttacagtggatcattcaatcccattcacataggccatctcgccttggcgaactggctatgtgagttcgagggattggatgaggtgtggttcgtagtcacgcctcacaatccgctgaagaaaaaggatgacctgctcgatgactcactacggctggaaatggcccaagccgctattgacggatatcctaaattcagggtctgcgatattgagttctacctaccgaaaccttcttattccattgataccctacgaaccttatcccgtaactatccgaatcgggacttttattttatcatgggagccgataactggcagctttttccccgatggaaagaacacgaaaaaatactccaagactacaaactgctgatttatccccgcctaggattcgacatctcgatcccggccatttatccgaacgtgaaaaaggtagacgctcccttgatggaaatctcctccacatttatccgtaacgcttaccaagccgacaaggatatccgtttcttcctgccggaaggagtgcggccttactactataagatctaaacaaacctgtctgtcaacttatataaccgaaaaaaagcagtagtacttacttgcccatagaatatatactgctagtggcaaaggatatatacttacttaggaaagttagtactactcaatcttaaatgtatgagcgtactgactatgcctaaatttacttcacagattttactgttattttctaaggtacttcacatcttagagaaccttctcctgaaaaacttcacagggttgaaagttagtatgagctgtttttctaagcttcatgttaaccgataaaagaacaaggaagttcaaaataaaattaggttacatcatttctcatgaccttcccgtaaaagttaatttttgtaccctatacaattaaatagataaaatacattaaacaaaacacacaaagcaccgtttttcttgtttttaatattttttttaattttatttgtaaacatcaaagcattacacatctattaactttttaaatctttcaaattatggacaaactcaaaaaactgacaaaagtcgtactaaaccaacaaggtaaagttcttccaaaagagcaaatgatgaaaatcttagggggaggaagtgcgtattgtcattgctggaacagttccggttcctttgaagcctccagctgctctgagtgtgattctaaatgcaatggtcttggaggagtacaaaactgcaataccataggaggttagtaacaaaagaaagaacaggttttagcaggcgccatctgctaaaacccgctttttttcttaaaacaaaaacgatcatgatctatcttctatttttagtcgctcttttgcttatctgttgtaatccggatcaagccaaggataatagcaaggacgaaacaatcgagtattttattccactctcacatcgggtagaaaaagacgtggatgaaatgtttgaggaatatcggtatgtccccttggaaacaagagacgatgcattgatagacgtactttacaaaatcagaaacatcgccctcttccaagaggacatatacatcggctctgatgacattttaatagcatatgataaatcaggaaaaatcaaacgtgtcttatctaaaaaaggggaggatccacaatcatacttcttcttagggaatttcacgatatggcctaatggggatatcttaatttcctcatcaggagatgtcactacttattccaattcgttcaaatttattcgcaaatggagtgatcatgagaatattggacttatagaggctatcatcctattcaatgacagctcatacattataaaatgtacgcctaccgagaggcaattgcgttacagaataatcaatcataagaacggaacctatatcagcacctatgactccatagagaaacaaaataaatatatcagctcattcacaaactcattcgaacgttttgaaggacttataatctctcatggctatcaaggcaatgagatacttgagtgtacgatggatagtactaaagttcgatatcgaataaatatcgacaataaaattcctccagcgggattttgggcacaagacggaaaggactatgtgcaaatcgtaatggaggaagctgaaaaaggatacatcggtcatatcccagattacgtggaatcaaaggaaacaatattactctccttcaagggaaaaagggatgatcttgaaggggttgccttaatcgacaaaaaagatggaaacgcaagagttttagagaacatcaagttcgatgacaacttccggtggttgcccaaacagttcttctcgttagatgagggctggtgcgccatgctaatgtatccggaagacgttttgaagaaggaagagttcgcacgacgcttccccggactgaacgaggagagtaatccagtgctgtttatcgggaagctgagataatcactaaaaactctaagctatggaacatgacaatctgttcatccaaattttagaaatcttatcgataaaatacacgaaggattttaccctaagattctacgagaagcatccacacaaaaacagcctgtttggattatccgagatgctacgttattataagatagagaatgtagcagccgaaattcaaaaacacaagaatgcttatcctcattggatgtaccctttgtggcttacgtagatcatgagtttgtattggtacgacatgtttctaccgaggcaatcatctattcatggcgaggtaaaaacatcacattatctatcccggtattcttggaacgatggtcaggaatcgtccttcttttcgaatccaccgatgaatctattgaaccggattataaagagcatagaaaggaatacttacgacagcggatagtaatcgcatgtttcgtttcattacttctatcattaatagggtgtgcccttatcaccaacagaggaatggagataggaatctgggggttatggggtgttaatgtgatcggagcatctttctgcggtatcctgctttctcgagagatcttaggctcggataaatatgtcaacaaaatttgttccttgtttttgaaatccagtgattgcaacgggacattggattcccaagcatctcatttcttggggatcagttggagtgtcttcggcttaggatattttctttccgcaatattgtttatcgccttgttgccccaatatgttatatatgcagagactctgaatataatcgcattaccttatacagcgtggagcgtatggtaccaaaaatttagggtaaaacaatggtgcgctttatgtttatctgtacaagctaccgtatggatcacctttcttatctctctattcgcgataggcatggatttcaatcaatgggatttatttgatttcactaccattggatgcgtgtatgggctcgtcattctatcgctccattttactgttacattatacgtaaaagaaaagcaaatccaacgaagcaacaataaacttagcagcataaaactgaatgcctctgtatttaagagcttattaaacgaacagcctcaatatgacattgacaaaaatacaggaatattattgggcaatagggatgccaaagagtggattaccattatctctaatccacactgtgctccttgcgcaaaattacatctccaaatagaaaagttactcaaagaatataaagaagagatttgcatacaaatcatcttgacctcttttagcaaggaattagaacctagcgccatgctactgacctccatgtatctactaaataatgaatcggattatttacgattcctatctgactggtatgcaaaagggcgtcataaaaaagaggattgctataaaagatacagattaaatcctaatgacaaagatatgttagccaattttcaagcacaaaacgaatgggttaggcgcaatacaataagttccactccaacagttttgacaaatggttatttattgccggaagaatatgagttaaaggatatgtcgtatttaataaattaagtactatgaataaattagcatcacaaatagattcgctaaataagcatttgataggctcattacatacaagttaccctttcgggttggctcatggcaaaatgggattactcatctatttataccatttgtatgattatacgcaagaagctatttataaagagaaggctgagcgattgctggacgatctcttggaaaacgatctctctaaaaacgcagaactcaccgtggaggaaggtttatgcggagttgcgttaggattggattatattgtaaaaaagcaatttgtagacggtgatattaatgatttgctaagtggtatcgatgatttgctattcaagaagctggttttcggaaatatggaatctaggtattccctgtctcaactcatccatttcttatattacatttataaaaggctggaaatccagacaaacgataatgagcgtttccctttcgagggcttagcaatcaagttagttaatcaattggccgatttgatagacgcctcctttttcgaggaatcctatacgttttccatttaccaatatcacgtaccgatattaatgaaaaccctgtcctgtcttatacaatatgatttttacaaggatcggatacaaaaggttctggaacaactatctctgtatatgttctcccatttgcctcatctgcatttgaaccgactatatctgttatggggcatgttacctttacgggtttgttcgccggattggcaaagatatgtggatgaactaagaaaatcaatcaacctagacataatatataatagagagatcaaaggcagggatatctatatcagtaatggatacgcttctctatatttcttgttggagggattaaaaagggacttccccgaatacaccatccctttcaatccgcacctaatttacgatcggatcatctcgtctgacgcttgggatgccctaatggagaacgaatactactataatatacacagaggattgctgaatggtttccccggtacggtgttggcattgttaaacattaagcaaagatatttatgcgaatagacttgacagatacaacatttattattcctgtacggatcgattccatgatccgtttggagaacctgttgatgtccgtggactcaatagtacgttatttccggacacgcatcttaattctggaggcctcatcataccaaaatgagattatcccctcgttaataaaagatgatacggtgaagtacactttcctcgtggataaagatcctgtattctacaagaccaaatacttgaatatcctcgcaaagcgggttgatactccacttgtttgtatttgggacgcagatgtgatactggaccaccttcaaatattggatgcggtgaaacagcttagaactaggacttctgatgtcgcttatccatatgatggtaattttttagatacgtcagatatattgagggaacattattggctccatcgtgacttagatttcctaaaaaaacatcaagcaaagatgaactctttgtacacagtagagggagtgataggcgcagtcgggggagcggtcttcgcccaaacggaaaaatacctgcaagcgggtatggagaatgaggatttctatggctggggcttggaggacggagaaagacattaccgttggttgagttttggctaccggatttatcggagtgagggctgtttattccatttgtctcatccccgggatcaaaatgggatgttccgttcaaggatacatagcgaaaaagcgatgcatgatatgaatgaagtagtaaactattccaaagaggaacttcgagaaaagttctccttggattcaagatagagaattgtatttagtgatgaaagataaaattattgggtcttaagttcattggcctacaaacctaagatacttcaccaaggatcctaagagactttatccatgaacaaacaagatcggtgacctcaaccttttaccacataagtcagcataaatcagaaatattttgtacttttgcgccgtattatacaaaataatagcataatgaatctattagaactgagtgaacaggaaataataagacgtaatagcatggagcagttgcgtcagatggggatagagccttatcccgcagctgagtatgtaacgaacgcattttccaaagaaataaaagagacattcaaagacgacgctgagccacgcccggtaagtatcgccggccgtatcatgagccgtcgtatcatgggtaaggcttccttcatggaattacaggattccgagggtagaatacaggtctatatctcccgtgacgatatttgcccggatgagaataaggacacctacaatgtcgttttcaagaaattactggatatcggtgatttcgtcgggatcaagggattcgttttccgtactcagatgggagagatttccgttcatgcgcaagaattgacagttttgtctaaatcacttcgtccgctaccggtcgttaaatataaggacggtgtcgcttacgacggttttaatgacccggagcttcgttatcgccagcgttacgtggatttggtagtaaacgagggtgtaaaagatattttcatgaaacgtgcggctatcatcaagaccatgcgtaccgccttggatgaggccggatacacggaggtagagactccgatcctgcaatctatcgcaggaggagccagcgcacgtccattcatcacgcatcacaactctttggatatcgatctgtatttgcgtatcgctaccgagttgtatttgaaacgattgatcgtcggtggattcgagggtgtatatgagatcggtaagaatttccgtaacgagggtatggaccgtacgcacaacccggagttcacttgtatggaactttatgtccaatacaaggactataactggatgatgagcttcactgagaagctgttggagcgtatctgtatcgccgtgaacggtacgagcgagagcacgatcgacggtaagacaatcagcttcaaggctcctttccgccgcttgccgatcttggaggcgatcaaggaaaagacgggttacgacttggaaggtaagacagaggacgagattcgtgcgatctgcaaggaattgaagatggagatcgacgatacgatgggtaaaggtaaattgatcgacgagatcttcggggagttctgcgagggtacgtttatccagccgaccttcatcatcgactatccggttgagatgagtccgctgactaagatgcaccgtagcaaaccgggattgaccgaacgcttcgagttgatggtaaacggaaaggaattggcgaacgcttatagcgagctgaacgatccgatcgaccaagaagaacgtttcaaggagcaattacgcttgagcgagaaaggggacgacgaggcgatgttcatcgatcaagatttcttacgcgcccttcaattcggtatgcctcctacgtcgggtatcggtattggtatcgaccgtctggttatgttgatgaccggacagacaacgatccaagaggtattgcttttccctcaaatgcgtccggagaaaaccgtaaagaaagataacgccgacaaatacgtggccttgggcatttccgaggagtgggttcccgctttgcagaaagccggctacctgacggttgacacgctgaaagaagcgaacgccaacaaattaagacaagagctttgtgagcttaataaaaaatataagttagaactgcaaaatcctacgatccaagaaatagaagcttggatagccaatgtaggagaataaaagcgtgatacgatggatttgcccggaaaaatcgcgataatgggaggtggtagctgggctaccgccttagccaagatcgtactttcaactcaagatagtatcaactggtacatgcgtaggcccgatcgtatcgaggagttcaagcagttgggacacaatccgtgttacctcaccgccgtgaaattcgacacgaacaagataaacttctattccaatatcaaccaagcgatcaaggactcggataccttgatcttcgctacgccttcccctttcttgaaacaacatttgaagaaggtgaagacctctttgaaagataagtttatcatctcggcgatcaagggtatcgtaccggatgagaacatgttgattacggattacttcgcggagtattacaaggttccgacagaaaatatagcagttatcggtggtccctgtcatgcggaagagatcgctctggagcggctctcgtacattacgttggcttgttccgacatcgagaaggtccgtacgatatcccccgttttcaagaatcaatacttaaagaattccttctgtaaggatgtgaccggtatcgaatacgccgccgtactgaagaacgtgtacgctattgccgccggtatttgccatgggatgaaatatggcgataacttccaagccgtatttatctcgaacgctattgaggagatgcgtaatttcgtggacgccgtacacgggctggagcgggatatcaccgactccgtctaccttggcgatttgctggttaccgcttattcccggttcagccgtaaccgtactttcggaaccatgatcggtaaaggatattccgtgaagacagcgcagctggagatggaaatgatcgccgagggatattatggaaccaagtgtatgcgtgagatcaatgagaaatataaagtgaacatgccgatactggacgctgtttatgatatattgtacgagaagaaatcgccgacaacggtcattcgtcaattaacggaaacgtttaaataaaatagcatatgaaaaacatcagtttaaacatcgacaaggctctgggcactgtctccaaggaacaggtttacgctcaagaggccaaggcaatggaatgtattgccacattacataacggtaacggagcaggtaacgactttttgggttggttacatctcccctcttctatcacggacacagagttggccgacatcgagaatacggcgaacgtgcttcgttctaaatgtgaggtggtcgtagccattggtatcggtggtagctatttgggtaccaaagcggtagtagaagcgttaaacaacagcttcgactggttgcaaaacgaccgtaaaaacccggttatgttatacgccggacacaatatcggagaggattatctttatgaattaagcgaagtcttgaaaggtaagcaattcggtattatcaatatctccaagtctggtacgactacagagccggctttggctttccgtatcttgaagaaacaattggaagatgctgttggcaaggaagaggctaaacatcgtatcgtagctatcacggacgctaagagaggcgctttgcggaccttggcggatcaagaaggttacaagactttcatcatccctgataacgtaggtggacgtttctctgttttaactccggtaggtttgcttccgatcgccgtggcaggtatcagcatccgcgacttggttgctggagctgtttccatggaaaaagctacagacgcgagtgttcctttcgctgataatatggccgctatctatgccgctactcgtaatgagttatataagaacggtaaaaagattgagatcttggcaaacttccatccgaaattgcactatatcgcagaatggtggaaacaactttacggagagagcgaaggtaaagacggtaaaggtattttcccagcatctgtagatttgacaaccgatttgcattccatgggtcaatggattcaagacggtgagcgtacgattttcgaaacggttatctccgtggaagctacagatcatagcgtattggtccctacagatgaagccgatttagatggcttgaacttcttggcaggcaagcatgtagacgaggtaaacaagatggccgagttaggtactcagttagctcacgtagatggtggtgttcctaatattaaggttaatatgccggaagtaagcgcattctatatcggtcagttgttctatttcttcgagaaagcttgcggtatcagtggttatatgttaggtgtgaatcctttcaatcaaccgggtgtcgaggcttataagaagaatatgttcgccctgttgaataagccgggatacgagaaagaaagcgaagctatcaaagcacgtttataatacgatttaccccataaaaaaacggttttctcatcacgaggaaaccgttttttcgtttgaatagtttttattactcatttaattctttaagtaaatcgctcccggctttgaatttgaccgagacacgtggagtaatcattacttcctcccctgttttcggattacgtgccaatcgctcggattgttgccaaggtacaaaagatccaaatcctttcatggaaatagattctccttcccgtattcctttcgccacaacagtcggtaacgcattcactacggccctaacaacatttttcggcaatcctgtttcttccacaagagattgtactaattctcctctattcatactagataataaatataccattcttcaccagaaaagagtccggtgagaacttagttgtttaatcattgcaaatatatgaatatttggggaatatcaaaatatcatatattaaaaatcaatgcatacagaaatattatatacctaaatgcaggtataattgaacccctttcagatagacaagtgagactttggtagaaatataattaataagaaatagtatacagtattatgatatcacttattcatagcaagttatagcctttgaaaattcgttattaatgcgctaactagagttctcaccgaactacgtcataatttattgattaattatctcaacgaaataaatttatatcccttatttttcaatacatctatcaactcatccagataattatagaatttatcaatccggttagggtgtacatgtaggtggatcaaaagtaagcacccatttaaaccatttttgtttcataaaatgaaattccattatatatcatatttatttaatttcaagaagctttcctcccatttctgttaattccgatttattacgtacctttgtattggtttttaagaaggttataacatgattcaagaagcgattatccgatatctgcgtaaacacaggcaggaatccctttctcccaaagttgttcttttcgatatggatggtgtattatatgactctatgcgttttcatgcacgggcatggcatgaggtagcgaccctccatcagctaacttctcggccggaagacttttatatgttcgaaggacgtactggggaaagcacgatcaacgagctataccaacgcactttccaacgagacgctaccgccgaggagaagcaaacgatctataaagagaaagcggatctattcaatacctataatgacggtgcccccatgaccggcgccgcagaggttctaaaagaagtggaagcatctggactgcaacgattggttgtcaccggttccggccaacatagcttgatcgataagctaaaccatacctatccgggacatttcaaccgagagaaaatggttacggctttcgacgtgaaatatggcaagccacaccccgaaccttatttaatgggacttcaaaaagcgcatgtgaagcctaacgaagcttttgtggtagagaacgctcccatgggagtagaagctgccgtggcagccaatatctttacgatagccgtaaacaccggacctctccccgatcaagttttattagatgccggagcggatttactatatccggatatggaaaacttagctaaagattggaaacaaatcatcgagcttgcgaaatccacccgattgaacgagtattccaaataagcgaacataaaaaaagaggctacccgataatgaagtagcctcttcttttttatcatcgaacggattatttcacataatcagccttattcaagaaatcatagctctgctgaacgctggcaaccggatcattgtttgtatattgctcaacttcaacataccaatcctttacgttattagcgtacatttgatcgaagataggcttgaaattcatcttgccacttgcgccgatctctttctcatccttgatatggatagccttgaactggctcggacggttcttcaagtaagcgacaggatcaccgccacccatcattacccagtatacatccatctcgaagaatacgtggttcgggcttacgttatccagcaagaaatcatagatcaactgatcgtcgatcttacggaactcgaagtcgtggttgtgataaccgaacgcgatgctagcggcagcggtcttataaccaaccgtgttaaaataatcgcagtacatcttcaagtcatccaatgtagtcttatcgttaaccggcatccacggttgaaccatatatttaacgcctaactcattatgagcatcaatcgcttgatcccaccaactcataacctcggcttctttttctttcgtaaatgcctgtccaaggtgagcgctcgtacacttcatacctaggtcattcaccattttcttaaattcagcgggagctaaaccgtaaatctttccgttatcatagcttgctgtctccagattcttataacccatcttagcggcggtttccaatactttctggataccttcttcttttacaaggtctcttaaagaatacaattgaagccctatatatttagaagactccgatgctgtagcggcagcttgtcctgatttaccgccacaagaagataataactgcggggctaccaacccacccgcaagcatcaaagaggcttgcttcaaaaaattacgtctgttctgcatagtactattaattaagtttgattgagaatttttacaaaagtaagactatattcttaggtttatatctttatggaagttaaaatcttcaaaaaggacattgtattttaattttcgttatctttggaggatatattattacttaaatcatttatatcatgaaaaaattatcaattctagcgatgggccttctctttgtcctgaccacagcctgtagtgtttccggcagtggtaccttattcgatggcaaagatagtaacaaatggaaaatgacaggcgatgtctccgttcaagacgacataatgaccttgaaaggtacggatgcactggccgtactgaaaaacggcaaatacaaaaacttcgatctgacccttgatttacgtactaccccgggaggcaaaggcgccgtctggttccatacggacccgaccttgaagaaaggatatcgtatcgctatcaataatgaccgggttgataaggtttggtggaaaatgacaggaagtcttgtttccgtgaggaatttgaccaaaagcttcgtaaaagaagatcaatggttcaagatggatatccgggtagccggacaagagattgatgtaaatataaacggcgaaccggttgtggagtatatccaaccgaccgccccatatcgtacggacgctaacgcctatgccttattatcggaagggacatttgccatagagagtgatggtagcggtgagatccagatcaagaacatcaccgtgaacgtaattgatgaatccacgatcgatatcaacgcacaattggcggaagctaacgatgagcaaaatgacgagatcattaaattacatcaatcggatttcccggtattagattatcacgtgcacttaaaaggtggcttaaccaaggaagttgccgctaagcaatcccgcaagaccggtatcaattatacgatcgcaccgaactgcggcatcggtttcccgatcacgaacgaccaacaagtcatggattacctaaatgagatgcgctcacagcctttcatccttggcatgcaagcggaaggacgcgaatggataaccacattctctcccgagactcttaaagaattcgactatgtgtttacggacgctttgacgttcaaggacaataaaggtcgccgtacccgcctatggattccggaagagacttggatcgagaatgaggagcaatatatggacatgatcgtagatcgtatctgctccgtattggaagagccggtagatatctatgtaaatccttgtttcttgccatctccgatggataagcgttttgacgaattctggacggaggcccgcatgaaccgtttcgtcgaggcattggcaaaaagcggaaaagctttagagatcaacgaactatacaatattccaaataaagcgatcattatgaaggcgaaagccgccggcgttaaattcacgtttggaagtaacaacgtgacaccaaacgtcagcgatctgtcttacagtatccgcatgatgaaagaatgtggcctgaccgctgaggatatgtataaaccgaaagttaaaatctaatcacacatttaccctcaccctaatcccccgtttagggacaccctaaatgagcgattagggtagacctaaacgagggattattctctctctcgcaacatccgtcgcatcttcatataccgatattgctttataatcatcttacggctacgcatgatctgataacgataaatgatacaagacaagatgaaatatacgcccgcttgaatccataatacccgatattcatgcgccacctcatgcaaggaagcgcctgccgtattgatacgaataaatccctggatacccggagtagaaggaaacaaataacccaccactttccaaaacggaggaatagccgcctccggccaagagacacccgagataaataacaagatgacagacgtgaaaacgaataccaacatgggcgactcacgactcgtcataaatccagatagcgtcatagacataaaaatacaggcaaacaggtaaggcagtaaaaacaacaaaatagtcagtggctcaccaacctgaggtaaggagaataacttagggacaatagccaatacccagatgcaaaccaccacatacagcaaaagataagtcagcgacttgccgaacacgatacgcaaagtcccgttaaaatgcctgcaaataggtaccaaactatggaaacgattcttttcccgtgccgttcctcccaacattccgatgcccaatatcaaggtctgttgcaataccaagatcaagatagccggtaccaaaaaactggcaaaaccattctgggaattaaacaacgctaccgattcatacgggatcgggtctaccgtgatctggtccatcttatccgtagacgacggattattatgcatccgaagttccttacccatatccaacgatacctctgtcgccgccaaaaggaaagccttataaaacaataaggcactcatatcgcaatacaacgagacggttgtctgtcgcccttcatgcaggtccttactataatccgggggaaagagcaaaattccataggccttcttctcatctaacatcttcttggcttccgccatatccggacaaacacccactacttccacatccggcgtggcgttaacccgtctggtaaactcacgactcaaataggaatcactttggtctaccaccaccatcttcgcctcgtgtactacctcgttattatatataaatgaataaagcagcggatatacgaaaggcaccaagaaaaagaagatcatgacccccgcatccttaaacacgtttctcaattcatctttccaaatataaaacgtatccagaagaccttcctttatgatatatcgtaaacgatgttctcttttcatcacatacagtttttacggtagatatttgaaatccaacaacgctctcttcaagttccgcccgataaggaagggcaggatcaagaatcccaacaaccaagcgtactcgcccaacgtatagaatagcgcccgcccgttcaaggcttgatcgacataaatcaagaaataatgccgcaaagggaacaaacgagccaacgcttgcaacgtagggtccataccttgtaccggaaacgagaatccgacaatggagaacgagatcattccgaacaggctggcgaagctaagccctaaacggggagtcggtaatacgccgatcataaatacgcctaccgcctgagaggatataatcagcaaaaacatcgccaaaagcatcggaaaccaaccgctatttaacgggaaagaattaattccatacaacaccgcacaatacataaagcctacgaccgtaaaaatagccgtctgcggcaataactttcccaacaaactaactgcgatggaattccctcccatatccaaccatttacgggatgtagaatatttaatttctgtaccaatgctgaataccgtcactagaaataccattaactggatgacacccggcaaaaccgtattattcaaatatactgaataattcaaccacggattgccgatcggatgcgtatcgatcacgatcggttgtagctgtcccatgatctgcgcttcggtatatcctttagcttgtccggtctgtaaacccacagcggcccccgccaataccgacatcgttttcatatcccgaaacagcaaagaagcggcgatcaaataggtaccattcgtatagaaagacaaccggggctgctttccagatgtggcgtccacggcgaaaccggatggaatgtaaaaaattccatatacattccctttctgcatttcctgacgagcctcggtaaacgacatggttttcatatacacctctgtctgctcaaaggcatccaactggcgaatcaaattgcgtgaggtagcagagttatccatatccaccactgctatcggcagatcggtcggcaatccctcatgcatcaacgatacaaagaaaatgacacagatagccggagcgatcagcatacaaaagaagtaaatcggttgagccaccagccgatgcacctcacgcttcgtgataagccagattctatgcaaactttctttataggtcatacgatctctttcccttttttctttaagatcacggacattcccggacgaagatcagcgactttctccaacggacgggcacgcacctcgaaagtcttcgagtcatattgtccattcgtctttgtcgctttccatgcggcatacgagcccatatccttcatataatagactttcaacttcaccggtaggtcccccaacgccgggataaaagcatttacttccgagccaatcttgatatctttcaacagatcctcacgaatactgaaagttacccatacatcatttaaatcagagatattcatgatcggagcgcctgtaccaaccaactcgccgacttccgggaaccgttctgaaacctccccgtcaatcggagccaccaaagcgctctcgcccacatacgactccacttcggcgatagcaccttccgcacgttggaccatagcggcagcggcagccttatcttccttacgggcaccttcttttgccatctcatattgagaacgggcagccttctctgtcgctaccatagcgttataattagcctccacctcgtctcttttttgagcggacatcacccctttctcgtataaattctgaatacgatcgaaagatttcttagcgatagttaatccggcttgcgccttttgccacatctcataagcggccgtaatttcctgttcacgggctcctttaatcgctttagcgttctgcgcctccgctgccgcacgagccgcctccgcttgtttcagcttcgccataacctcgggcgtatctaaaaagaccaaagtatctccggcttttacctgatcgccttcgccaaaacgataagaagcgatacgtccgggaaccttaccggagatacgaacttgggtggcctcggcctgccccattataatatcgtcaggcggtgtaagcaggaagaaacccgccaaggctaccaatccgatcacgaccaatactgtgataaaagctaacatcatgttactgatagaaaacttcttgttctcgttcatctctgtgtatatttttatttgttattactcttattcatttgcggacagtttacccaaagccttgcttagataaacttctgttaatttcacctcgatttgagcatcaatcaaactagagcgagcagaaacccatgctgtctgcgcctccattaagttcaaagccgggataaccccttcctcaaaaccgaaattcgcacgccgcaaattctcttccgcattttccatattacgggaagaagcgatcaactttttgcccgcttcattcactttataaacggattgatttacctgcaactcaatcttttcacgagcatcctgccattccagtgtttttatgcgcgtttccgctttcgccgagttacgcctataagtgccttcccaccaaccggacaagggtacctttaccataactccgacattaaacataccagcgaaatcatttttaaaaccattaaaaacattcggattcgtgacgaagtaattcgccgctaaagcgacattaggcaacatctctgccaaagcaatacgttcttttcgcttatagattttcgttgccagatccaaacttctcagttcattacgattcatgaaagcctcattcagatcagccgaggcttgtgttgtctctaccggaaaattatccagcttctcgtctgcaagcgataaatcctcctctaaagacagaccacaaatttgcgctaaaagcattcgggttaaagccagaccattctcaaccttagtctgagccatctccgcctcattcagtttcaccttgacagaaagcccatcggcctcggtagcgactccctcatagatcatagcggtcacatcactatccatcttacggagcaaatccacataagcgtccgccaatttcttcttattcaccaaagatatgacctgccaataggtttcgtcagtcttataaatcaagtcctgcaactgtaaattattcattgactccgctaattgcttggcaaacttagtgatttggttataattaacgatcttcccacccatgaatacaggctgcaccaacgatacattacccacccagatattctgcacatccaaatgttgcatatcgttcaccccactcatcaaatgttggatcatcggtaattgggccaagccacctaaagaagagctcaaggatgaggacaaagcgcccatgtccagtaagtttatatccttctggttccacatataggcaccgtttgccgataattgaggaaaatacttggtaaaagcggctttcttctcgttatccgccatcttgatcttttcgccagagatttgtagctccttattgttctggatcgccagattccggcactcttccaatgtcaacattcgctgagcgtgcatacagctcaccgtgactacaaatgttaatagtaagatagttcgtttcatctttatatcgttttaacctacctatataatgccatcatattccctatgtgacaaaaatataaaaacccgcataaaagtataggtttaaagcgaatataaaattgaactaattcaataaaggatacgtttcttcaacttacaataccaagaatcactaacccccatatattgagctatatatttatcagggacccggcttacgatccattggtggttcgtataaagatatttcaggaattcttccgccttacaggtttgacggacagcgaacattgaatagagcttggaaataatcatcagcatcacattctgataacaggtagcgaaagctggatatcccaacgacaaacgttcgatatccgtccgggaaaaacagagcaattcaccatcctcgatagctttcacctcaaactcggaagggacttgtgtaaaataacctattgtagaaacaaaagggtacatactatccgaggagaaaccggttacgcattcattcccattctcattaatatattgattgataaaaagccctttattaataaaataggcatcttggcacaactcgcccgtacgaatcaaataatcccctttccggattgtcacacctcgagtacaactttccaaatcctttaggaaagattcatctcgagacagaatctccggaataaaacttaggaacttctcaaagtcgggagataatttcatagttaatcatccaaggtaaatctcttctgtccgatcaaattaccgtcagagaaaatatccacacggtaagtacccggagataagaattcctcgatattccaatacatggtcactgccacctcctcaccttcatattctatcattttcttcatagaataattgatttcctttccttcaaaagcgaatacatccgcacggcttttcaccaatatatcgtcatccggtttcatgatccgtacatataccatcttttcgccgacaggagcggtaatgttcttcgctatcttgaaagtcacgacgaattgctgcatcttcttaatacgcttagcgagtttacctcgagagttcacaggagtcacgttaatatccgtcgcatccaaacgactagctaacgttactctttccgtcaatttctctttttcctttttcaaggtagcagcttgtgaagtagccctctgatatttctgaacagcctctttcttttcaaccttcaattgctcattctcacgattcaaggaatcgatttggacaacatagttacgcatgattttacgtaaggtatccaattcctttttcaagcgagctatttccttcgcattcgtagccttcaccgtacgcaattcttccaataaacgttgtacctttgcttgctccgtagataatagggcaacaagggaatcattgcctacgctaaacttataaccttcatattgaagagacaattcattatattcatcctccaaagattctttctcaagatcaaaggtttccaccaaatcagtcatttgctgcttttgatgataaatataataaccggcaccagcaataatcagtaccaatactataactgctacgataagtagcgaaagtttatttacttctttattctctttcttttcagtatccatatgaggttcttagctattacaaaagcacaaaattacaatttcttatccatccgaacaacaaagtacacctaaaaatagaaaaaggcagagaggatatataccaaaaaaaggagtcaccccttacggactgactcctctctcttccggctttcgcctttctcaagacggcggctacctactcttccactgttacgcagtaccatcggcgtgacgaggcttaacttctctgttcggaatgggaagaggtggatccctcgtgctatagccaccttaatatcattatcaagattttgaccggacatcaatccgaagagaccagcttcgccttatcgtcttaaaatatatcaaccttcactgtgaggaaagtcccgggctattagtaccactcggctcggacgtcgccgcccttacacctgtggcctatcaaggtcatcgtctataaccacccttgagggagatctaatcttgaggccggcttcgtacttagatgctttcagcacttatccgatccgtacttagatacccggcggtgcccctggcgggacaaccggtaaaccagtggtacgtccgacacggtcctctcgtactagtgtcagagcctcgcaaatctcctgcgcccacgatagatagagaccgaactgtctcacgacgttctgaacccagctcgcgtgccactttaatgggcgaacagcccaacccttgggaccttctccagccccaggatgtgacgagccgacatcgaggtgccaaaccattccgtcgatatgagctcttgggaatgatcagcctgttatccccggagtaccttttatcctttgagcgatggcccttccatgcggaaccaccggatcactatgctctagtttcctacctgatcgacttgtatgtctcccagtcaagcgcccttatgccattacactctgcgaccggttaccaatcggtctgagggcacctttagaagcctccgttacgcttttggaggcgaccaccccagtcaaactacccaccatacagtgtcctcctaactaggagttagaactcaaacaaccgaagggccgtatttcaacgtcggctccacaaatactggcgtacctgcttcaatgcctccggcctatcctacacatcgtctgcccaaactcaatgtaaagctatagtaaaggttcacggggtcttttcgtcccatcgcgggtaatcggcatcttcaccgatactacaatttcaccgagctcacggttgagacagtgtccagatcattacaccattcgtgcaggtcggaacttacccgacaaggaatttcgctaccttaggaccgttatagttacggccgccgtttaccggggcttcaattcaacgcttctcctcgcggatgacatctcctcttaaccttccggcaccgggcaggtgtcaggctgtatacatcatgtttccatttagcacagccatgtgtttttgttaaacagttgcctggacctattctctgcgcctcgccttacgacgaggaccctttatcccgaagttacagggtcaatttgcctagttccttaaccgtgaatcactcgagcgcctcagtattctcaacccgaccacgtgtgtccgtttacggtacgggtgccgcatggataagtttagcggattttctcgggagcatggttacgtccatattacgttgcgcaagcgctccgtatactctcaggttcgactctccccgcggatttgcctacgggaatcaatatctacacccttcaaccggctattccgtcagccggcaggactgtcacttctccgtctccacgtcactccatgaggcagtatgggaatattaacccattcttccatcggcggcgccgttcggctttgccttaggtcccgactcaccctgatccgattagcgttgatcaggaaaccttggtctttcggcgggggggtttctcgccccccttatcgttactcatacctacatttgcttttccatgcgctccaacaagggtcatccctcatcttcgacgccgcatggaatgctcccctaccatgtcttgcgacatccacggcttcggcagatcgtttatgcccgattattatccacgccagatcgctcgactagtgagctgttacgcactctttaaatgaatggctgcttccaagccaacatcctagctgtctctgcgatccgacctcgttagttcaacttaacgatcatttgggggccttagccggtggtctggattcttctcctctcggacacggaccttagcacccgcgccctcactccctgtaaatatatatcgcgcattcggagtttatctggacttgataggcggtgaagccctcgcatccaatcagtcgctctacctcacgatatactataaagaggctgcacctaaatgcatttcggggagtacgagctatctccgagtttgattagcctttcacccctaccctcagctcattggaaagcttttcaacgcttacccatccggtcctccagttggtgttacccaaccttcaacctggccaagggtagatcactcggtttcgcgtctaccccccccgacttggcgccctgttcagactcgctttcgcttcggctccgtaccttaggtacttaaccttgccggggaaggtaactcgtaggttcattatgcaaaaggcacgccgtcacgtcattacgacgctccgaccgcttgtaggcagacgggttcagggtctatttcactcccctgctcggggttcttttcacctttccctcacggtactggttcgctatcggtctctcgggagtatttagccttacgggatgggccccgctaattcacgcaagatttctcgtgccccgcgctactcaggataccactaggcttcaatcgtcagtcgtgtacgggactatcaccctctacggtcgccctttccaaggcgttccacttgactctatcttgccacgtcgtggtcctacaacccccgtgtcgcctagacgacatgggtttgggctcttccgtgttcgctcgccactacttacggaatcattgtttattttctcctcctatgggtacttagatgtttcagttccccacgttcgcctccctttcgggatggcaggccttcagcctgccgggttgccccattcggatatcccgggatcaagggctatttgcgcctcccccgggcttttcgcagcttatcacgtccttcgtcgcctccgagagccaaggcatccaccgtctgcccttgcttactttctctcacctcgtacttgacgcacgggttgatatatcttaagctcgctctacttgtttcttctttttgatgtccaacatgtcaaagatccttcttactgagcccgactgtcgtcgggacgggattggctgatgcctatccctctcaataaactgtggagaataacggattcgaaccgttgaccctctgcgtgcaaggcagatgctctagccagctgagctaatccccctcattcggagtagtcccaggcagagttgaactgccgacctctacattatcagtgtagcgctctaaccaactgagctataggactgtcaactttgccaagacttacgtcccagcgtcatctttttctctccgaccggcctcccggtctgtaagatctatatataaacataatctcaacagcagcacaagggatcaatacctcgtatgacctcggtacggaatcctgaagctccagaaaggaggtgttccagccgcaccttccggtacggctaccttgttacgacttagccccagtcaccagttttaccctaggccgatcctcgcggttacggacttcaggtacccccggctcccatggcttgacgggcggtgtgtacaaggcccgggaacgtattcaccgcgccatggctgatgcgcgattactagcgaatccagcttcacggagtcgggttgcagactccgatccgaactgagacgtggtttggggattcgctccctgtcgccaggtggcctccctttgtccacgccattgtaacacgtgtgtcgccccggatgtaagggccgtgctgatttgacgtcatccccgccttcctcgcagcttacgctggcagtcccaccagagtcctcagctttacctgttagtaactagtggcaagggttgcgctcgttatggcacttaagccgacacctcacggcacgagctgacgacaaccatgcagcacctcgcaaacggctattgctagaaaaggtgtttccacctcggtccgaatgcgttcaaacccgggtaaggttcctcgcgtatcatcgaattaaaccacatgttcctccgcttgtgcgggcccccgtcaattcctttgagtttcaccgttgccggcgtactccccaggtggatcacttaacgctttcgctgtgccgcttacagtgtatcgcaaacagctagtgatcatcgtttactgcgtggactaccagggtatctaatcctgtttgatccccacgctttcgtgcatcagcgtcagtaatggcttggcaggctgccttcgcaatcggggttctgcgtgatatctatgcatttcaccgctacaccacgcattccgcctgcctcaaacatactcaagccccccagtttcaacggcaattctatggttgagccacagactttcaccgctgacttaaaaggccgcctacgcaccctttaaacccaataaatccggataacgctcggatcctccgtattaccgcggctgctggcacggagttagccgatccttattcataaggtacatacaaaacgggacacgtcccgcactttattcccttataaaagaggtttacgatccatagaaccttcatccctcacgcgacttggctggttcagcctctcggccattgaccaatattcctcactgctgcctcccgtaggagtttggtccgtgtctcagtaccaatgtgggggaccttcctctcagaacccctatccatcgtcggtttggtgggccgttaccccgccaactgcctaatggaacgcatgcctatctatcagcgatgaatctttagcaaatattcccatgcgggatccctgcttcatgcggtattagtccgactttcgccgggttatccccctctgataggcaagttgcatacgcgttactcacccgtgcgccggtcgccacccggtattgctacctgtgctgcccctcgacttgcatgtgttaagcctgtcgctagcgttcatcctgagccaggatcaaactcttcgttgtttaaattgttttatcatatcctcgctccggaatccgtttatcgtagtccaaagtcatacttcttttgacggtattaatccggagaatctcttctccaatacttgtactacttgttgaattatgtaaatctatcaaagaactcttctgtcgctttcgttttgcgaacgtggctgcaaagataaggacttttattttaaacttccaaattattccggaactttttttttctaaaagtttgtttcatcattttgtaccggcgttctctctcgaatgcgggtgcaaaagtagtgttataaaacataacctccaaactttttcggaatttttttgcaatatttttttcatgagggggattgcgtacattgaaataatacgtgacgctcttttttaacttacgagtcaccacgtgtaccgaaaacagggctctcacgagtgcttttacacgtataaaaacgataaacaggtcctggcgacgagaggaaatcacacgggaaaaacggctttctgctcatggaatcacgagaaaatcgctctgtacacgtgcttttgggccacgtacaatgtgagtttaggccgattatatcgccccaaagactaaaaaagggctaagagaacagtattacataaacaactgtctatctatactttaagacatcaagaaaatcttccaaaaaaatcacagggcgcattagggcgcatctttacgtgttcgcaaaaacattttacaaaaaaaaatatattactccatctatatataagtaagacgctaatttttttataatataaaagttttacaaacctcgcaaagatgcgccctttgcgccctgaaccatcccctaccaacttatcagggatacaaaaaaagcctatgggacacggccgtaaagtcattgagataacacctctatcccattgactttaccaccgtttcccattgagatactatcgtaaacccgacacttcaagaagggataatcattccccagataggcgtcttgaccatgaacacgaatagttcgctcgcaactgaactgaaccgcaccatcgtcccgttaatcgctacccgtcccatgatagggacaaatccgttcttctccttgctgccgttcacataaatttgacttctcccaatatccacaatttgcccctaccttcttcatattcaattttaattgcgccaatctgggctttttataaggttattacggagattttccgtaaatttgtagaaataagacagccaataatatttataaaaatatgcgagaaaaactctcctatcctgttaggatcatcatatccttactatccatttttctctggagctttccggcagaagggcaggatagtgaaagcttaaaaaagcaattagatcaaaagctaaactctttcgcaaggcaatatgtgtcttcacgcaccattaagattgactccatcctcatacagaagaagaaagtcacgcttttcgccaatgaagctttggaggacatcccttttcgggaatacaacgtttctgagctttacgcaagtatagctcccctattccccaatgcctccaagatcgtcatcttgacccgagatacagacattgagagcttgattcccgaatacgacagaaaaggacgtcccaacaaaaagaggctatactccattaaagagagtaaatacccgctaacccgtagcctatccacccctcatgagataaaaaacggattacaaaaccgtcatatcgccctttggcaaagccatggtttatattacgcccagaccgcccatcgctgggaatggcaacgggctcgcatgttcggcaccgtggaggacttatttacgcagagttttgttcttccttatctgaccccgatgcttgaaaacgcaggagcgactattcttatcccccgggaaagggacactcaaatacacgaaatcattatcgacaatgatcgctctactccgggatccgagtataaggaattggatggagagaaagcttggtcggatggggagaaagccggatttgggcatattcaagctacttatacgaatggggagaacccttttacgcaaggtacctatcggcagacggtcacacagaggaaaggaaaagaaagtctcatcgagtggattcccgaaattccggaatcggggaattacgcggtctatgcctcctatcaatcttttccgaacagcacagagcaggcactgtataccatccatcatgccggaggggaaaccacaatcgccgtcaatcaaacaatggggggtgggacttggatctatctgggaaacttcaaattcacggcacatgaacaagcccatgagagaatcgtattaacgaatcaaagcaataaatcgggaaagattatcacggcagacgcaatcaagatcggtggcggcatggggaacatcgcacgtagcccgctagaaagtccctatccgatagaagcagagacaagtgggtatccacggtttaccgaggcggcccgatattggctacaatgggcgggaataccggatagtatctattcgaaaagcgctttccgcaatgattatcaagacgacatttacgcacgtccccaatgggttaattatttaaaagaacagacccatatccctatcgacatggccttcgcattccattccgacgcaggaaccaccccggatgactcaattatagggacactcggcatctatatgtctaaaagcaacgacggaatctacaccaaccggaaaagccgggagatcgccagagacctaaccgacatgatccaaacacagatcctgtccgatgtccgcaaggtttacaatcctcaatggagccgccggggcatgtggaatcaatcttatatagaggcacgtattcccgatgtcccaacgatgctattagaattactatcccatcaaaacttcgccgatatgcgttacgggttagacccacgcttccgtttccttatttgtagggcgatctataaagggatgctccgttatatctgtttccagaataaacaggagcctatcgtacaaccgctcccacccgatcgtctgtatacggagctcgtagaaacgaataaagtgagaatcggctggaaagccgtacaggatactcttgaggagagtgcctcaccaaccgcctatatcctttatagtcgaaaagacagcggtggattcgataacgggacgctcgtaaaaggagaagaaatcattcttccaattgagacgggtattatccatagttataaggtagctgccgtaaataagggaggcatcagtttcccttccgagatcgtaagtgtttaccggtctcctaaaggtgaaaaggataagacggtattgatcgtcaatggattcgacaggatcagcggtccagccagtttcgagagtacggcggatagtttagccggctttctttatgccgtcgaccggggagtgccttatctgaatgatatcgcatttatcggggatcaattcgaattccgccgttccgccacatggaacagcaatgataataacgggcatggggatagttacaacaattacgcaggccaagtcatagcgggcaataccttcgattatcctttcatacatgggcaggccatggccgaaaccggttattcctttgtttcatgtagccataaatctttggccgagggagtcgtaaagccggatacgtatccgattattgacttgattttaggaaaacagcgccaaccggttatcactcccgttttacaggatacgcttcgcagttaccttgcccaaggcggcaacttgcttgtaagcgggacgaatcttttctccgacagctggggcaacgcacaagaccgtacgttcgtcgaggaggtactaaaagggaagttggctagccgtaatgccagcaaggagggaatcgtaaacagttgcgcatccccttacggatatataaacggcagatacacgttccggacacgtccgaaccctatttgctactcgatcgagtcggtagacggtgtacttccggcggataagctcgcccataccatcttgagatatccggagaacaatatcggggcgggaatcgtttatgaagggaaatatcggacttgttcgctcggtttcccgtttgaggcacttcaaacaccgtcggaacgaaatcgactcatggagtccatcttacgctttttctccattcaacaacaaaataaaatacagtatatacaatgaaacgaatcaattgctttatcccttatggaaaaatagaggctacacgacaaacggtagcgcaattggccgagtcgtccttagtgagtcagatctatctaatcacggacgatccccacgccaaggctatttatccctgcaatttaatccgcacggagaatatatggagcacgaagaccctccgggaaatagccggctatgccagtgcccattatacgttaatttatacgaagactgaagagcttcaattaggcatgtatgccctagagcgttttgtcgccatcgccgacgatacgagatccggtatggtttactccgattattacgagaagaaggagggcaaactcaacccccatccggtgatcgattaccagaaaggaagtcttagggatgatttcaatttcggctccctcctactctatcgttcttccacgctacaaaacgccatagcctccatggatacggaatatacattcgccggactctacgacttgcgcctgaaagtctcccaaaacgctccgctgacgcatatcaacgaatatctatatacagaagtagagaatgatttacggaaatccggagagaagatgttcgactatgtagatcccaagaaccgctccgtacagatcgagatggaagccgcctgtacagatcatttaaagatgataggcggctacttgccccctcatttcaagccagtccgttttgacgagcagacatttcaaacggaagcctccgttattatccctgtacgtaaccgtgtacggacgatcgaggacgctatccgttccgtactgcgacaagaggcgtccttccctttcaacctaatcattatcgataatcattccacggatggcacctccgagcgaatccaagcgatcgccgccacggaccttcgtattatccatatccagccggagcgtgacgacctcggcatcgggggttgctggaatataggaatacaccattcggcttgcggcaagttcgccatccaattggatagtgatgatgtatacagtgacgagcataccctgcgtaagatcgtggaagccttctacgagcagcgatgcgccatggtggtcggaacctaccgaatgaccgatttcgatatgcgaaccatcccgcccggaattatcgaccataaagaatggactcccgagaacggccgcaataacgccctccgcatcaacgggcttggagcgccccgagccttttatacacccttgctacggaaactaaacctcccgaacaccagttacggagaagattacgccctcggcctacgtatcagccgcgagtacccgatcgggcggatctacgacgtgctgtacctttgccgccgttgggaagataactccgacgcctcattggatgtcgtgaaaatgaacaaccataatatatataaggataaaatcaggacttgggaactcgaggcccgcttaaacatggaaagacaatgaaaccaaacaactgggtcagctcatcgcaagcgaccgaattactgtccaagcaactcgtgacatggccattggccgagaagaactataaggcgctggaggccgtgcaagtaaaatccttcgatatgggagggttctcgatacgtgcgcaattcaatcccgcccgtattgtttccaccggggccaaggtagatgcccgatccctaaaagaacgcaaatgcttcctatgtcccgagaacctgccggtggaacaggagcgactgcctttcggctttcgccatctggtattgtgcaacccctacccgatcttccccctgcatttcacgatccctacccggaaacatactccgcaactgatattgccgcaatggaatgacttcttggaactgacaaggagactcgctcccttcaccgtcttctacaatggaccccgtagcggagcctcggcaccggatcatgcccacttccaagcggtgacacgaggcatcatgccgctggatgaagaggtaacccaatttatacgacaatcgtatgcgagtgtatacgacaaccgtatatacccactcaccggcaacctccgccccggcctcgtcatccaagccgccaccgaagaagccgccacccggctcttcaaaaagatctacgccgctttgccgatacttcccgatgagcccgagccgatgatgaatatcttcggctcctattacgataataattgggtaatcacggtaatccctcgtaaacgccaccgcccatggcaatacgaggctgaggggaacgaccatctcctgtccagcccgggaactgccgatatcggaggtcttttcatcacccctttagaaaaagatttcaaaaagatcaacccggagcttctgcgagatgtttaccaacaagtatgcctcagcgaccgggacgtagaggaaattttcgtacatttgtcatctaattagttttcaatagatatgaaacaattctttaaaatgatgtttgcctcaacgctaggcgttatgttggcaatgggaataatcataacggtcttgatatccatgactataggatatatcgccaccgtaggtagcacacctgattacacccccaaaagcaatacggtattcaagatcaagctagacgggacgctagcggataacccgacggagaatccattctccgccttgatgggcgacaaggaaaacatgctgtcactgaaggacctgctcgagacgatccggatagcgaaacagaatgacaagatcgcggggatttatatcgaatcggggcttctctcctcgggtagcgccagcttggaggcaatccgccgatcgctgatagacttcaaggaaagcggcaagttcgtggtagcttacgccgataatttcacgcaagggaattacttcctttgttccgtagccgataaggtattcttgaatccgcaaggcatccttgaattgacgggactcgcctcgcaaaccctattctacaaaggactgatggataaggtaggtatcgagatgcagatttttaaggtaggtacctacaaaggtgccgtggagccttttatgctggataagctgagcgaggcgaaccgggagcaaatccaatcgtatatctccaccatctgggataatatagccgaaggcatcgccgaatcacgcggcatcagcgtgaacgatatcaaccattacgccaatgaggggcttttcttcgcggaccctgtgaaaacggtagaatgtggctttatagacgaattgaagtataagccggaggtagaagcatacgtcaaagagctagccggacaaaatggagagaaactgagatcggccaacttagctcaaatgaaaaccctcaaggcctcacccaccaaaaacgccccggagatagccgtactttacgccgaaggcgagattaaggcgcaaacacccggcaacttttacgatatcgaacaaagtatcacggagaaaatggccgatgagcttatcaagctaaaaaacaatgatgacgtgaaagccgtggtattccgtgtgaattccccgggaggtagcgcttatatatccgagcagatatggcgtcaagttgtcgagttgaaaaaggtgaaacctgtggtcgtttccatgggcaacgtagctgcctcgggaggctactatatctcatgcgccgctaataagatcatcgccgaaccgaatacgttgaccggctccatcggcatcttcggcatgttcccgaacgcctccggattattcgggaaactagcgttgaccacggacatcgtaaagacgaacacattctcggacttaggagacctctcccgtcccatgaccgagagtgagaaagcactgatacagggatacgtggaaagaggctaccaaacgttcctttcccgctgcgccgaaggtagaggtatgactaccgaagcggtcaacgctatcggacaaggacgggtctggacgggtgagcaagcgaaagaaagaggtttggtcgatgagctgggcggtattgaattagctataagcacagcggcggggttggctgatctggatcagtatagcgtaactaccgtcagtggttccaagaatttcttggacgagttcttggaaagccagctcggagaggtgaaactctctatcgtcaaaaatgtattgggtaatgagttcgagtacttcaagacgttgaataatatcaaggcgaattgcggaatccaagctcgtatgccttacgatatgaaaccgttataataactggaccatgctgacagatcatacgattaagttcaataaactcctcactccattctctttcctttatggaatcggggtgagattcaggaatcagctgttcgactggaaaatccttcggacagagcggtatgatctgcctattatttgcgtggggaacctgactgtcggggggaccggaaaaactcctcatacggaatacatcatccgtttgataaaagaccgataccgggtagctgtactcagccgtggctataaacggaaaacctccggtttcttgctggccgatcagcgaagtaccagcaaggatatcggtgacgagccgtaccaaatgaaacgtaagtttccggatattctcgttgccgtagacgctgatcgccgcaggggtatccgcaatctattggctctgccagagaataagcgcccggaagtgatcgtgctggacgatgcctttcaacatcgatacgtcgcccccacgctgaacatccttttaaccgattgccaccgtctttatacgcaagataagctcttgcccgcaggccgtttaagggaacctgtggatggcgctcgacgtgcggacgtgatcattgtcacgaaatgtgagtcatatatacaacctatagacttccggatcatagaggaggatatacatctctcagcttatcaagagctctatttcagccgtattctttacggggagctggaacccgtcttttccggtaaagcccccagacgcacattaaaagggctggcctctactacagaggttttattggtatccggtatcgcatccccggcacctctcgaaaaagagatccataaatatacggagcatgtcacctctttggtctttccggatcatcacgccttcgatcggcatgacatccagaaaatacaaacggctttcaagcggttgacttctacaagtaaattgataatcatcacggagaaagatgccgcccgactccgtgaccttccttcgcttcccatggaatggttttctcatttatattgtttgcctattacggtgggtttctgtatggatcgggaaaaacaatttcaagaattaatagttaaacatattgatacaagaataaagaatcatcctatattacgttaacaatcttatgagcaatagaacagaaatatcgactttgggagagttcgggttaatccgccatctcaccgataaaatagaacttaaaaatccgagtacgttgaaaggtgttggtgacgacgcagccgtactggattacacagacaagcaagtattggttacgacagaccttttgctggaaggtattcatttcgatttgatgtatgtgccgttgaaacatctcggctataaatccgcagtcgtaaacttctccgatatttacgccatgaacggccgcccgaaacagattacggtatcattgggtatttccaaacgtttctgtgtagaagatctcgaagaattctacgagggcattaaactcgcttgtgatatctatgacgtagatctcgttggtggcgacacttccgcctcacgcacagggttagcgatcagcatcacttgcctaggcgagggagaaaaaggcaaagttgtctatcgaaacggagccaaggagaccgatcttatttgcgtgtccggcgatttaggggccgcctacatgggtctccaattactggaacgggagaaaagcatatttaatggggagaaagatttcacgcccgatttctctggtaaagaatatttgttggaacgccaattaaaaccggaagcccgcaaagacattgtcgaagttcttgatcaagctggaatcgttccgacctccatgatggatatctccgacggcctctcttcggagttgcttcatatatctaaagaaagtaatgtaggctgccgagtttacgaagatcgtattcctatcgattaccaaaccgcagccatggcagagcagtttaacatgaatctgataactgcggcattgaatggaggtgaggattatgaactcttattcactgttcctttagcagatcatgataaggtgtcggaaatgaaaggtattaaggtgatcggtcatataacaaagccagagttaggcaattatcttgtcggtcgtgacggaggtgaagtcgagcttaaggcgcaaggttggaactcactaaactaaaaagaaatatccgctctgaattcacgaatgcaaagcggtccatctcatttttattgggggacggaccgttttcctattatttcacttcaatggatcctaaataattatagaagagttcaaaatcacttatcttcaagaaaggtaagtgataaacatccatctttataatttgagcctctatagccattttcccatacaaatcagccaaagacatactctttatatcaccgttatgatagaccttattctttttctcgggaagctgtaccttcttatccaagaaacggatataagtataagaggtagccagcggcttattataggtaggcacttttccgactttcctcatatcataaaaccctttcgcacgagccgtctcacaagagacattcatgaactctggtatattcacaaatcgaaagacacaatcatcccatttacaaaagccaatcttagccaacgcatccggctggtctgtcttaatttgtgggcaccacaacccttttaatggaaagatctgcttatccatatcatattgtaacatctccgactgactctcaatacgaaacaccttactaaaatcaacgtcccctaacgccttttccaatttagcggcatattctttcttaagatccgccatagtaaatggatccgcttgatttttctctaccagattcttgtcacaatgagccatataccttactatcacatcgtcatcaacagccacattatttaatttaagcgcataaacaaataagagatcggacgttaaatcgaccacaccctcaacttcgcttttaaaatattccgaaacaatattcccttgactaagcgcatcattaatatttatacaaagacgccgtccatccagctctaccacgacaagaggatgcgtttctacctcagaataaacgcccatactctcaaagagtttcttatcgtaatccggaatatcaacgatcaccgcctcttgactagctagattctcttttggcatcgtagatatcttcccatcctttgttaacgtcctaacaaacaaatatccggaaaccttagggacaccaaacataatcttatccccttttttatacactttcccatcacaggcagacaccgcatcacgagttcctatcccagcagcaaatgccaaacatacccaacttaaaacaatactccaaattactttcttcatatctatagcttattaatcattctctacccgcttccaaaaataagtaaaaatccatatttatctacacgctccccctatttaccctgcttatagcagctaattccacctctaccctcaaatattttcaaaaaatccaccgccacctattgcatatatcaaaaaagtccgtatctttgcacccgtaatcgaaacaacgatatacaaaacgacatgatggtgccatagctcagttggtagagcaaaggactgaaaatccttgtgtccccggttcgattcctggtggcaccaccaaaaagcttttcaattttagaaaacccttgaattatagatagttcaagggttctttttttaccctcgctacgcatttcattacatatttgtgaagttggatttcgccaattcagtggctttttttaaggcttttgaaaaagccataaatatgtatcatacttcattgtttttcaactatttgacaatttcaatctccggtgtgaaaaagtaattttgcacacatgaccggatgaagttgaaagtgtgaaataaatttaaaatttcggtatttcccatcgggataaaaaaaaggaatcgaacccgggatacaaaaggcaattcgaacctgataaaaatgggatttttatggctattccacaagtccctcaaaaaagccaccgaatttaacatttcgtttcacgtcctcatgccatccggttttgacgaaacaattggatgtaacacctctaaaaaaacaaaagtgatgaaacaaggaacaatgaacattctttttttcgtgctcaaaacgaaattgttgaaaaacggtgaggcccccgtactgatgcggataaccatcaacgggagctacgacgatgcccgtatccaaagaagcgtgcctctgaacttatggaatgcggccaaaggatgcagcaagggcagggacagggcatccatcgcattgaatacctatattgcggagttacacgcacgtgccctcgagaaacacaaggaactggtattggaacaggccctgattaccccgaaactgatcctgaaacgtgttttcgggaaagacaccgaaatgcgtacattgctcggtaccatgcaggatggcatcaaggaaatggaaacactggcaggcatagactactctcccgttacgatcaaccggtacaagaacgtggtgaagaaattgcagcggcttatcccctcttattacggcaaggaggatatcaccttccatgagctgacaccggagttcatccgcgcgtttgacatttacctgaaaacggaggggggactgtgccgtaacacgatagtccgctacatgaaatgtttcaagaaattcaccaacatggcattggcaaaggaatggatgcgtaagaatcccttttacggttacaagatggaacaggacgagaccgatccggtattcctgacctacgacgagttgcaggccgtcatgaaaaagaaattcaccatcccacggctcgagctggtcagggacatatttgtcttcgcgtgcttcacaggtctggcgttctccgatgtcgccactctgagtggtgaaaacctggtacaggacaatctcggtgactggtggataaggaagggaagggtcaagttggaacaccgcagaaaagcgtcttccatcagcaacatcccgctgctgcccgttccactggccatattggagaaatacagggaacatccgatctgcgtaaagaaaggatgctgcctgcctgtcatgtgcaaccagaaaatgaacagctacctcaaggaaatcgccgatttctgcggcataaagaaaaacctgaccacgcacgtggccaggcacactttcgggacgaccgtcacgctcgccaacaatgtacccttgcaggacgtgtccgtcatgctcggacatgcctccacacgcatgacgcagcattatgcgcgggtcatgaacagcagcctgaaagaggcgatgaacaatgtgaaggaacgtctggaatggtaaatatgcaaccggcccatcattgaaggtatctgaaaaggataccttctttttgttatactgtctgttatccattttctctggaaaacatctttggtcttcataatcatcctgtactggcgaaataattcatcatggacactacatatccaagtaacggtatcagtacaccgattacatataccatagcgtaccccaaaaggacgagaggtaatattttacgataaagaccggcgataacaagaaatataaacaaaaagcaaaaaccataaactcctatttgaaaaccgggcatcaattcataaacgggtacgggctcggggttaagcatggctccggccacaatggaataaagacttgccaacaatataaacaatgtatacaggcagctcttaaaaatcccgggatcgtttcttttacaatagagaattgtttggatatcactcctaagaaactcaatacccagcaagaaagctaccatgacacccgtatcaaaagcagagaatgtattcatttcaatcaatcacctttgacgcgaagatatgtaaactcgctcacatacggatggctttggagaaaataatgcaaagtgtttgaaaccgaaagggatatgtggttttgtaccagattcttccatttatggcttttgaccgtttttggggggagttaggataacgaatcgctacctatccgttgcctttttcaggattgaaaaagaggtttggaaattgctcccgcatctcgttctatatcctgtttaccatagtaaagaacgcagtttttgctatgtctgttgatgcaaacttagtcatatttttctgtattggaaaaaaaataggctctgtttacaagccaaggtatcttattcttcgttccgctatatttttcatgccgttcatttgctctgcatataataattttgcaaacaaaggaattagttatgaatcaggcaaatgtaaaggtatcgttctacctgaaaaagagcgaggcggatgctgacggcaactgtcctgtaatggcaaagttgaatgtcggaaagtattccgaggcggctttcagtgtgaagatgaaagtgccacagtcacgctggacctccggacgtgcaactggcaagagcgtggcggcaaaggaaatcaacaaccgtctggatgagattcgtgcgatggcattgaatatctacacggagcagtcggctgttcgtgacggtgtgacagccgatgaagtgaaaggtgtactgcttggaatggccagcgggcaggaaacgcttttggggtatttcaaacgattcatctgcaattttgaaaagcgtgtgggagtaaaccgcacaataggaagcctgcgggcctatcgcaatgcctacaaccatatcgaaagattcttgcaggtgcaatacaaactgtcggatattccgttttccgcattggaccgctctttcatcgacaagtatgatttgcaccttcggactgaacgtaatctcgctcccggaacgattatcaatctgaccgtacagctgaaaacgattgtcggtgaggccatcgctgacggcatcattaccgccagcccgtttttgggatatgagccggtgcgtcccaaagccgtacagaaatatctcacggcagaagagttacacaggattatgaccaccccgcttcacaggcagactctctatcatgtccgtgatttgtttctgttttcctgcttcacctccggcgaggatgattttcccgaaaaccgcttgcggcatgaccttgctctgccggtaagggggcgggctacctttgcctgtggaatggaatctgcggtttctcatttgtttttccatcttgtcagggcatctttcttcgcgtctcccgtgcagttgtaatacagctcgcagatacggcagaactcctcgatgatgacacggtaaacctcgcactcgccgccggacgggatgacggtatgtgtccgtatcctgtatttctctccggcgaagtccctgaacttgcgtgtaatgacggtcttgccgataagcttggccagttcctccttgttatagacatcctggttctgcttctctataccgaacacggtggattttcccggacagtggcaggcacggaaaagcacatgtcccctgaaggcagagaacggctcgccatagtgcggattgttctcttcctcgatttccttgtccctgttctcgtggtacacccggccgctccagcaaatcatgtttatggaattgttgtaaagcaacttgaactggctataaagctccgcgatgttgttgcgggtggtcgtgccggtgtcaagtatcttgtacctgagacggcggaagaggctgagaatatgccttgtacgctgtgacgacggggtggttatctcgtccgactcgtcgaagacgaggcacagctttcttgaggtgcgcctgacaaaccttgccagcccgcgcttcagcttgccgagcatggaggtggagaggacgaggaacacgccttccgaaaccgtttccagatcggcattgctccttaccacccggaactgttccctgttcattgagaggaagggtatccatgtcatgttggtggcgatggcgggagccagtatgatgacattgcgtatcttgcggtatttgagcaggtacttggcacggtggtatacggcggcggtttttcccaagccttgctgccagttcagcagggcgtatcgtttctgcaagacgaggttctggtcgtgtttctagagcgcggtgaactcacatacgtcaccgtccttgttgacaaaggtcatgcggtcaaggtattcggtcagccgtgtgtcgggcttcatgtcggcaaactgctggttctggacttcgtattgcctgcgttttctgccgatcagtttttctgccgcacggatttggcgcatattcttctctgtagggaattccggcatgggcagtactgcgcgtcccagcacgaggtcgttgatgcctgccgccttatgcgggaccttgtccaacagtcgtggggcatattgtttcagcttgaatccgtatgagctcttcaccaatgccacttcctcgcgcgacacgacattctgcgaggtgatgtacctacggaggacggcaagcactttttttgtggtcagtttcttcctttcccattccttgccctgttcattcgtggcgttctcaggaggtttctggttgcggaattttgtgaccaacgcctccgctttggcgatgtgtctgttcagcttggcgtgcgccttcaactcatacatgtatttggcgagtttgtactcgaacagttcaagctcttccttatctattctgtttgtctcgcgcatcaggtcgaaacgcagcctgtgcttcatcgcccttgcctcgctgatacgtttccccagttcttccgccgttatgaattcctccgcgttgtatgtctgcaccccgatgtggatcgatttgcggaagaataccattatcttcgtgttgaagttgtctgctccgatggaggcgaaggcttcaggggacagcttcgtctggccgacaatacaactccataagctgcacgagaaccgtaaatggccgaagacgcagcgtctttcaagatagaaatagacttaatgatattcgggtcaaggttagaaaacactgtagcatccgcaataacaccatcgataacgcacaatggggcagaagtcacaagttgccacgaccacgaaaatttatatatagccaagccgattaaattaagtttttccatataatataaaaaatgattacttattaaaaatagatttaacagaaacaaattcgtaactactaaaaaaataattatagttcctaaataacagaaaattatcacactcatttttataatttcatctcatattaacctcctatttatttcttaattgccggggagttaatccaaatattcttttgcagtaaaaagagaaatgagcttgggacttaaaattaaaatccatggcaatatcttgaaatgatatttctgtttcagaaattttttccagtatccgttctgctttttttttttgcatccagcgataaggactttcattaaaacaatgtttgaatttcctgctgaaggatcgctccgatgtacaatataattcggcaaactcctttacggtattgacctttttataattattgagaacaaactcttcgaatgagttccatgaactggacacaagctggaaaaattcgatcaactcgtttttcgtatagatccccctcaatactagcaacaattcttgttgtttcaaacagtgcatgtgtctacattgcagtttcgaagctaaatatgtacgtaccgactccaatacttccagcagcggtgtacgtataggtaaaacatgattacctttctcactaacgctggtaaagagagattcgacaaactgtctattgcatgactttacgtctttattccaaaacaacaataataaccgtgaatcttccaacgccgtaatattattagggatgtgttgtggtataatcaccatttcgttttgttgcaaaaaaatatgattgtttccataatctacagataactttccatacaaaaggaaaatcacacaaaaagaagattcgttgtcaatgctactattttcttcttttctaagctcacaaaagacaaaacctgtattataagctacttgatagttgatacaagacaagtgctctttcagataaagtagtttcatggtgtattaattttattcaacaaatataaaacatgttataatcactacgctttcataaacaagacaataatttatataaataagccaaaatcgattatatttatattttcaagataacacgaaatcactttaatatttaacatacataataaaccatatttaaaaatttattttacacaaaaaaacaatcaaatattttcaagttcagtggcaatatatataccttctattcgataacaatcaatttgttttttacagcgtttgacataacaaagttccacaagaaaaaaagatgaatcaaaattcatttccccttgtatgacagggaagcgcaaattaccaaagtagatgtacattacaatagattcgtttagaaataaaagaccatactctaaattccgttgaaaagggaatctactagatgttcggttgtaaggaagaaagtagaagtcacatgaagtagagggaatccaagagtcccttttacctttttattggaaattggagatgaatttattatatggcagagacttttcctgcgctctgatatttctctaaagatctttgacataagttgttaatctgattagttttatacaattctttctgacaaagaaacaaaacaatatttagtattatcattgatattgcaaaccaaattttgtcaaaaacaaaactagtattatttttgtagtaaaaaacactcttgttaaaaaattaaaatatgaatcttttcaaatctcttgttcaggcaaaggacaaatgcattttggatgactctcttttttatgacacaattggacattccgactcccttgaagagttagtatgtgaaaaaactttcttttttcttttagtttcaagtggaaaagcgaaaattcatattcaagatgtacaagacagcattcatagtgtaggaaaaaatgatttgcttgtcattcctgcgtctatgactataatatttcaacaattaagcaaggattatatgatgtattgtcttgcgcttactcctcctttcttccacagcctcccttcaagccaatttttatatgggaagctatgtgaattcgttacaagatactctttggctgctatacatttaaagaacgacgcaagctattatttcaaaaagacttttacgttgtttcaaggatatacagtgaaaggacttttacataaagaagggatttatgggcatttatgtaatttttttattttaaatgttggagacatattcttttccaatatagaaaatgcttcgccagccatatccaacaagagttggatatactacaagttcaaagatttagtttttgaacattatcgtcaacaacacaagatacatttttacgcagatcgcctgtctgtttcggacatctatctatctagaataatcaaggaggaaacaggacaaacaatacatgcacatatcacaaaattactttatacagaggctaaaaaaatgctttcctgttcaaaatatgatattcagacaataacagacactctcggttttgcagaccaagcctcttttagtaagtttttcaaacgattggcaggagcttcaccaaaagaatatcgaaataacttgaactgccgatagactgaaggtttaacggtagttctaatagcaatctatcattatcatgattactctattgcttatattttgtagtaattattaaaagagacgtaatttaaactatctcatacctttatcttttatttagcggtgaatttgcattcttaacctggtaaatattggaatattaatctgataaaaagacacatttaaaaagttacaattattcattccttttatatccattttattattagtagaataagggatatactgaataaactttaagagtattccatgaggcttgaaaataagatgagtttcaatatttccgtacgataaagtgattattcgctcgatcgcaacaagcaaatgaaatattgttattcgcttgatagataccaagatatccttgctacaatcatgtgtagcaaggataaatcttttaatttggatattgcgacatcctttttgttattcaggtaaatattttttataatcatctgttatatccgggtcaatgaccggacgtacggagagggtcatacaacgcctgtaagtggcgtttgtattggaggcaggcgcccaaccgagagtacctccagtggaattgagcagataacggcccgcatgagcatcattcctggcctgtgccacggcgaaaatgacctcattccctcccgttttgttgttcaagaaggagccgtcataaatacttccgggcagaggtgttttcagaccggatttatttatattataatatgcgaatctcaatgttacagcctcgttttgtgacatgatccggaatccgtagggagacgggtcaaaaacggtttttccgcccacattctcggggtttccggaagaaggtttgttccacggataaaggaatacccagcgatccttaaaattatcaaccaccctatgcgggaaacattcatacagccaaaaactttgatgggagacgatcgagttcggcctttcgatactttgtttcatcgtcatagcggccccccttgcctcctgagcattatcaagaccattattcgccctatcccctttctgctcccaaaggaaatcaaatggcttgccattgccgtcataaaagttcgtatttgtccgcacgtcatgtgccgggaacgggtctttcctgccccattggtattgcatgccgaattccttatacgcactttcactatactgtgaattaaccgcctcgtaggcccccaacagatgcgacatcaattgaaccgtttccgctccgtctcctccatatttaccgatattcaatactgtcggatacttgtccactatccagatgtgccaagaccagagggtcgggttccccttgatctttcctgatttaatctctatcagtacattccccggcttctgtccgggcttgacatagatatatgaatcaggacctgatcctccctgcttgaacagtttgctgagccccgctctttctatatcgttttgccgccccatcgctttaatatccgtccacaggatattgacagtccagtcatcatccgcatctagcctgttcagcataaaatcctccctgtttcccggaagccctcgcttgccactcataacggcgtcatgatccaggagcttcttgtaataattataggcggtattcacgcgggaaacggggataaagatcccttgcttcgcacctgctttaagcatatatgtattcgcttcaggctgcactattccggaaaccagctccacctcgaactctctctcagggaaaagaccgtcaggggaataaatcttgaatctcgccttaccggagtaaagacgtggggctgtgatatcgtcaacagccgtgaaagaaaccggttttcccgaaagggaaggatgtgtctcttggaaaggtgcgaacgtctctatcacatcacccgctccgttatcggacaaagcggaaaccagttcgatcttgtattcgctgttggccttgacataatatcgcttctgtttgccgtccatcagatagacattttcgctgggcaccagcaatgactgacgcagccctttatcgaagaaggggatggcattatattctttctgtaagagactgagttttcccgacgcgcttctaccggttcccgcatgtgtaacggtgaagacataagtagtattaaaattatcgaaatactccagattctccgtgatgtcgggagccgtcaccgtgtatctccatatccctcccgcgagttgatccgctttctctatcttgaacgggttggcggcttcggcttggaaaataggtttcaggccatgcggctctgtcctcacatagaaagtgaccttggctcctgcctcttccgccgtaagcgttcgtccgtctttcattatcaccttaccaggttgcccatagctctcgccgtactggttgacctcgataaactccagcggctggctgcacgcctcgtccgcgaagatctgtagggtgacattgatatccttggactgctcaaagccaaggaaccatttcatacggcccgctttcacataagcggctttcagcgcattctgggcatcttccggcctttccggccacgaacggtccgtgtccacctgctccgtgaccgtaaaggtcacgattttctcgtcggtcgccgagggttttatagaatagctgatccatgcgggcagcccctctaccgtgaacccctcgggccaggaagtctgcactttcgccgtcaggctacccccctccctataaaaagtgaaatgatcatcgctgacccccagcatatattgcccgtcatactgcacgttggacatcgtggactcgttccataccacgacattgtacatgatattggcggccggccctttcctagcgtcctcttccgtatcgaatcccgggccacccacctccgtgatgttcaccaagtaacggtggttccgcagtaagggcaggtactcgtatgtcgcgtcggcctcggttcccgtacgtttcaaatagtctatccggaagaacgtctccttgtcgggacgactcttgtccacgccggtcagcccgacaacgatataggggcgtctcaagaaattttccgtatcctcttccgggagcgtctctccgttggctccttgcgtggcacccgtcggggtattgaccgcctccgggacatagacttcacgcaataatatcttctcttccgctatggaagatgtcctgtcggtccttcctgttacggccggagcgggatcgggaatggaaggttgtttcgcctttctattaacctgatcccaataagcctcgctctcgaacggagagatccgcccttttgtattggtgttataaaaaaataccttggtcagcgttatcccctcgataccctcggctttctcgtcaaacgtggaagccccttccgacgtttcgctcagtttaagccccacatctacacgtgccacggcacggatcaggtagatggtcccgagttttggaacggcgccggaaccgtgatccaccttgaccggatccgagactccccacatcgggagctctccgtccttccattcccccttgtcgggcatgaagaatgtgaaaagccccatgacctcttcccgtgtttttccggtcaactcatccgccccgatctcgtctgacgtagcgatattggccagcatcacgaaggtactggtattgcccgaaggggtatttttcgccagcagggtcatggtacccttgcttttcttatcatccggggcgctggagggagtgaaagaagtcactttggcctcgtatgagaacctattatctttgtcaaacacaagtaccctgatcctctccgccgccgtctcgttctctccctccggcgtaagggagcgggtcagaggattccgaagcccaagcccttcgacggacatggtgacagatccccagccatccttggttgctatttccgttcctctgcctccatgctcatcaaaggggtcactgcacccttgcatgagaggcattcccataaatatcgccaagaaagcgaatagcaaagtgtaatgtttgattctcatatgtatctattttttaaactgtttctctttttgatggcatgagcgggtgcctttgttaccaggggatagccacttccgtatcctcccattcatccacaacaacgtcatgctccatgttcttggtccctttcagcgtggagaagacacggtagatggtattacgacgaatattgtaatacgccttgtcatcttgcccaagatccggattatagagttcgatcttgtacgtctcatcggggtctcccgtccggtaatcgatagatagtaccaaggccagcgcttcctctttcccgtagactcccggagccacatagatatagcgaggtgtctctcccgtatatgggagcaaccttccttgacatttagccacaaaggcggattctccggaaccctcgttggcaccttcgtgaaaactgggcctttccggtaacaacaggggatctcccgcgtagtccactcccctgatatccggattgccgctaccggtggcggtatattccccggcggaaggcagtacggaataaccgctggtctcattatttaaggagagtttcgtcactctggaaagcggtaacaaaggcgacaggtagtttcccgtatcatcaaccgtcgtaaggataaactcgacacgtgcgtgcgtgcgttccaggagtatactgggtgaaagggttaccctgccattgccgcccatattgtccggaacgtggagattgcgttggcctgccatgggaagatacttccggttttctcccttcagatcgtcggacgtgaaaatctcggttttctccgtcagcagtttcggatcaggaatcataagctcttcccggatctttttcaatccggattcacaattgatcaataagacaaaattataattaccacccatcagctctaggtccagggctatatcggagtcccctacgtttattcctcccatctctctcatctcgaaatgatcaatgccggttatacccgtcaatgggttggcagtgccttggggataatagaaaatgactttctccggagaggttccgatgttcttataagcgaagaggaggacatgcctgacggttttctcatatacctccgcgccgatataattctccttccattccccctctgaacgcacgggggccttcgtcatccgggaagaactcgtgcccttgttcatttccgccacgatccggatgggaatacccgtaacggatcttttcatatcctccgtatcaggcgagcatccggtcaattgtacgattgccaggcaggtcactgtcaacaaccttatcacagttccgtatttcattatatatcgttttttataataatctcaactcctttcagataccacacgagtcttaaatctgtcctgagatgatatcagcacctagctctacgggacgggagacgacattccaatccaagacggtcgcctgtaccagcgtccatgtactcttctcatacttgagtttcagagttatgggaaaatcatggtcacactccaggctatacggtggttcgcccgaatcaccccggaacatgatgatgtcatccaccagattggcggtataaaagatttccccggttgtcttgttgaccagggatacgagcgtgtttctgccttcctccagcttcatcagcgtaaagtcagcctttaacaccccttccgtgtcacgtgtggcttcggccacgtactcaaaacgttcgcaaagggcgatctgcccgttaaagtcataaacaccgttgtcatcttctatccttatgacgaatttctcgtccatagggaatggatcggggatggacttgatggtaaaatgtacccggtatgtcagttcccgcatgttgaaggacacccgctcatatacgcttcccatatcctcccggttctccagcgatacggaagcgagcccgacatacagaggcgcagggactgaagagacccttctgtctttcaaccgtagcgcgccccacatctcctgcttggccgtgacgccttccttaaaacctgaaaaatcataggccaccaagtcgctgccaccccatgcgacaaacgtgagcttccccgtatgccgcaatgtggcgggcaaggaataatccgccgaaagaaccgccttcttgtcggagaattcacccaccagcacgtcttgctcgtcaaaggcaaatacccggacctgcctgatatctgacggataattggggaattgttcgcaagaagtccggctgtaaaattggaaattgacaccttgcggacaaccactcaagttatcgaatatggctgaatcgcaacctataaggcaacaggccagcaacatgataaatatggcaggatgtacgcttctgattctcatttgatatagcttataattgggattattaaccgtttgaggtctaactatttgtctattggagaaagaaggggaaagactcccccttccctctttgaaggttatgtaagaaatcgttggctgagtttacctcttatctgaatatcattcaagaacgacatcacgtgagacaaggttccactggagtaccttggccacgacacgcatgtaggtctcttctttctcgatatctggattttcgggattagttggttcagtagggtctggatcgggcttcggcaggtacggatccttagggtcggaagggtcccacggcatacccaggccctggaaagccgtaattgtcagcagataggtgttattacgacgaacatcagcgttcacaaccgtctttccatcagcggttgtttgacggttccacaacgcgcggtatgcgcatcttccgtttgtataggtataagcgttttgacccgggttcaactggcttttccgtgcggcttccttgctagcgtagataagcccatcaccttctcctcgatagaacgtctcgccctttaccccagatttactgattaacttaccttgatccgcgtcccaatcccatacctgttttggagtataagtagcgtagaccttggcataaggcaggcggtagtaaccataattcttgtttccggccgtgagagcctctttcttcactgaattctccaagaaataaatacctggtacctttttagcctcggctgcatttgccgcgaccgtcttggccgcgtacatgccaagatcagtcgtttgtgaaccttgtgccgtcaataggtttcccaggcggaccaaatgctccctggctgtaccattcggggcttgggcattttgaaaatcaacatagtcatcaatggcggatgtaaaatctttgtaaagcccgtcactctccgtgattgtacgctctcccgcatggttgcggaaaagatatgtctttgcggcgccgttgatagccgtatacgtgaggtcgtcaagatcaacggatcctcttccatccgttgtttccgtatttaaattatccccctttgcgaccatgccttgcgacacgacacgttccatgtcaaaggagaatacattctgggcctcttccgtgcctgtcttaactgtttccttggagatattgtcctggatggttttctgctcgacgctcgaggccatcacgaacttattttccgaggcgagagccgtgatgtcggccaccgcggtagccgtatttccatacacatagttcgtggccgttgcgataccgggctcaagatttcccctgttaaacaacaacgccattgcttgggagcccgcagtgactttccatggagcgaccgtgtaagtgccgttgactgtcgttgcccagaatttatcctcctcgtcagcctgtcctagcgtccagtctttagtcttgccgggagaaataaaccgtaaagtctcgagtttgctctccgcttctctacccgcataatctccttggctgtcatttaccgccttggtcatgacatctttcatggtagagatgtacattccagcgaatgtgcttccctcggcaggattccctaccggaggaacatcgtcatcattgcaggccgtcatgcctagacctaagaccgcaacacccgctaaaagaaatttgtttaccttcataacttaaaagtttagtgaataaataaattactattgttatataaagtcttaactttattcataagcgccttcgccatagaaaaccttggcacggtcatccccctgtttataagcctccttcagcaattcttccgcctttttccagtcccccttgatatggtaggcgaccgccatcgggaaaagggcacggctgtcgttcctcacgtcgctcaacacccgtaaggcgctgtctgcctttttcccgtattttagcaaggcgttggcatagttcagtttcgccaccacgtcttcgggaaactgttcgtacgccttttggaagacggggagggggctctccccccggatgagatatatttccgagagctggaacatctcgtgtgagctcagacactccggcctcgtggcaaatatttcaggtaactcctcctgggtataagcccttacgtcgaaactgaaacgaaaggtcgttcgacggagttgcggataaaactcattcaagaggatgtcataggtcctgccgttgtccaagttacgtatggcggattctcgttccgtatccgtcggataccggtctatgatagacagcaactcctctttattggacaggggagagatgcctacgagctttttaaggccctcccaatcctccccggcaccgaccgtccggtaagtcactgcccttttaagtccgggatatttcccggagatgtaattcgagagcgcaagggtacgcccttccgccagtgaccggttatattccgctttaccctcgggggaagcgaaaccttctatgaggacctctttcaactcggccccttttatatccaggcttcttgatatgaagatttccagccgggcgagctcctgcccgttattggcgaaggcttttctcagttcgtagctcgccacgggaaaagtgaccttgcagtcaaaggagtctttataatatttgaatgccaccttctctggctcgatgaaatcatacatataatcctctttcttgaaaataggcaggtcaataacagccacggttccttgattctcacgtatgccacaaccaacgcaacccaacagctcctctctcaccatcacatgtccatccgccatccagcgttcgaaagggacggattcctgcagggaaatgccctgctcctctatgtccgaaaaaggatggagcttattgtcgaaccgtgatgtccttgaattttcgccgagagccttcgaccgtgtaatggccttataccgcattctgcccgctacactgacaggcgcgaaatcaatcctgtcatcctcatcggcggaaaccagggatggatagatgacaagggcgtcctgtgactccaaccgggtcatggcatccacatgcagggaaagacgcaggctttttccgtctgcgcttcgcttgaccctcacgtcatacccccaatgtaatggtgacatgttccgcccaacgaccttttgggcctgcgtgaatatagccgtcaaaccaaggctggcacagacggttgacagctttatgtaataatgtatcgatctcattgacttcatgtttttatatcctacacctattttacccaaggcctgttttatttaagtatataaatgatagagagggcggctcttgtcgggccgaggtaatcggcccctcccttccccgtcctttgtccacaagccgtacatttgaactcgtcatatctcacgtgcgcgtaccctatccccaaagcggcttcaaggctgaacctgtcggataggatccaatgataaccggcgctgatgccgccaccgtagaaatagccctcataacggtgcgccttcatctctttatgcttgttctggagaataaaagggatgtttatcccaccgacattcatctggcctccatgcgcgtgcagcccgagaaaccaaccgttgaatctctcgcaagcccaatagcgtatctcgggttgcacaagccaatggctccatttccttgtcttgtatccatctgcggtgggatcgttctcatagaagaaaaaattcatgcccacctgggtatccaaggtccatttttcccctagagagaactccagcgagagattaggagttaacagcgcatcgtatacgagattattctttatcgcgaccctttgtgaaaaagactgcaagctgaataacaggaagaagaaaaaaatactttttttcattttggcactgatattatttttagcgaccgaaccgcttggttcataatgttaatttttgatgatgcaaagttataaaagctaaatgttacacttgttacataaaacagacaattagttatcgataaaagtcattttgaacgagttatgtccgtaatatcaacaataagacataattcttgatggtttctgccattccgctcgcggtaatagtgcaagtctcatcataccacaaatcctctcatcgtatttgtagcgtgtcgtattttttattccatgcacgcaatggtgacagcattagaacggacaaggtccttctgaaatatgatagtaccgacatcaagagagcgaggcacttcccgatgctacgagagaacgagtgcggaaaccggtatctttagaacgatctcccctttcggggccggagatctacctaaaagagaggccgtggacagcctagccatccattccatcgtgatgttcatcggctgtattcctccttgtccggaatccagctgtctatcaaatccctatgcccgtccatccactggcgtatggctctagtctcggtcccactggtttcttctatggcccgcatcagagagttgatctcggtatcagataggtggatgtttcccagaagggcggcagcgaacggatgctccttactgaatcctttcctagcgatggaatggatttgctcggcctccccataaacatttctcgagtcttccagcaccctcaggcgaaagcggtcaaacatccagtgcggggtccagccggtcacgacgatccattccttcttgtcgatggccttcttcagcaatgccgtcatggcgggaccgctggagatcatgagtctgtaatccaggccgtattcagggatggctttctccgtgcatttcatgatgccggtaccggcgtcaatccccacgatctccccggaaaaccgccgggtatgggcacccagttcctctatcgtatggatcgggacatattcaggtaccacaagcccgatacgggcgctgtcgtatatctgcccgaggatttccagcttaccatcgtatttccgaaaataatcggcatgggtcaccggcatccagctgtccatgaacacgtctgtcttgcctcttgccagagaggtgaatatgggggcgatgtctgcgttcaggagctcggtcctgtacccttgttccgaaaggatctccttggccagataggtgaccgctatcccttccgcccagttcgcgtaggcgatgcggattttcttgtcggatatgttaccgcacgagaagaatatcgtgatggccatcagggccgtgaaaagtatcgttctgtctctcataatcattttgctttttattatatgtgtcattccttttgttttttccgagccattccctgcgtgatccggtcaagcacgatcgccagtatcacgacggcaatccccccctcgaatcccatgcctatcttcatctgggtgatacctttcaataccacttcccccagacctccagctgagatcatggcggctaccaccaccatggagagcgacatcatgatggtctggttgacaccggcgagaatggtgggcaatgccaatggcagctccaccttgaacaggagctggacgggagtggcaccgaaagagcgggcggcttcctccacgttcttcggcacctgccggaggcccaatgcggtgagcctcgctaccggaggcagggcgaaaatgatcgtggcgaaggctcccggtaccgttcccaacccgaaaaatagcaccgccggtatcagatagacaaaggccggcatggtctgcatgcagtcaagcaccggctgcaagatcttgttgcagtgtccgctgcccgccatccagatccccagggggattcccagcatcagcgccatgccggtggaggagagtaccagggccagggtctgcatggtctcctcccagaatcccatcccgtaaacgagcgacagccccaggagggtgaagatccctgtccccctgccactcttgtataacgccaggaaagtgagtatcgcgatggttatgtaaaaaggtatcccgagcaggacgcacagtatcccgtcgataacactttccacccctaagctcagcaggtcaaaaaacgatgcgccgtgctcggtcagccattccacggccatttctatatattctcctatatttatcataattctattgcgttttgaatgatttcattgatttcttccttgtcttttcccgtcacctcgataatgagcgacgagagcggtaccattccctcgaactcccgtttctcgttgaccacccagatgggcgagttggtcttcgtcatcagggggagtatgtcctccaccacagtatcgcccaatatggagtgtacctctttccttacgatagagtcgatgttcaggatacgctccttccttaattggataagttccttcagatggacctcgcctaccagtatgccatccggatccactacgggcaacacggttattttacgttctctcatcttcctgatcaggacctccggtccctcttttccctgccttgccaccataggcttgtccaccatgatggatgcggcggtgataatcctgctgcggtccacgttctccacgaaacacctcacgtacttattggcgggatcggtcaggatctcctcggaggtaccgatttgctgtatctccccgtcacgcatgatggcgatacggtcaccgagcttgacagcctcctccaggtcatgcgtgataaatacgatggtctttttcaccttcgactgcaaggccagcagctcgtcctgcatctgtacccgtatcagcgggtccaaggcggagaaggcctcgtccatcagcaggacttccggatcattcgctaaggcacgtgccagtcccacccgttgctgcatgcctccggacagctcgttgaccatcaggtcggcgtatccgtccagcccgaccagacgcatgctttccgccgccttttgctcgcgttccctcttttcctggccttgaagctcgagtccgaaagcgatgttctgcaatacggtatagtggggcatcagcccgaaatgctggaaaaccatcgccagctccttccggcgcagggaacgcaaccgttcatccggaactccggcgatatcctccccgttaatcagtatctcaccggaagtgggcctgttcaagcggttgatacacctgagcaggcttgacttgccacttcccgaaagtcccatgatcacgaatatctcaccttcccggacagagaggctcgcgttgttcacggcaaccgtacatccggtctccttcaggagctcacttttacttttcccttttttcagcatcttgaaagccttgttcctttcagagccgaaaatcaaatacaaatccttgatctcaattttatttttatccataatcctttaaaaataatatcctatgtttatattaaacctgacattccagttgtcttccgttccaccggcaaaggcttcgtcccatacgtcgccaagccatgcgtgattcctccccacggcatagtcgatgtaggtgaagacctttcctatcgccaaagaacaccccgtcacgttctccaggctgtcattaaacccggcgacgcgtttgcccagcaggctgaaatcattgtacaggcagatatcgtccagaaaccacttgttcacggggatccggtaggacaatgacaccgtatatatatccgccctggaggcgatccggtaagacgacccgtaagccgccatcgtcaccacacttctgtcttcccctggagcccgcacgggtctgagattatagttggtatactgcattttaaggttccaccgccgatagtcggcaacatagtgcagggcaaaagcggtacggagtcctgtctttcgtgtgtccatattatacaaacctcccataaggaccgaacctccgagttgatgtctccacaagtttccgaaatgatataccacccggatattgccctgatgcgcctccttatcgcgtccggcgatgtcataggcatagcggctggcggacagttccgagtctcctccggtcccggaaaggtcggcgttctggaaataggcgagcgacaactcccagcggtccttatggaagaggtattttatccccatgtccgcatcgtcctcaagaccggcataatagttcaggttgaagaaataattgttacccgtataaggcaggacaccgaaagggaccgttgtcaggcctatctgtaaccggtgtgaatcattgaaacgatagcctatccaaccttccctgagcatgccgcctcccgaggaagagggatagaagcggtaatccaccgctaaatcgatttttttataggaagcgttcacgttcagacggagcacgtcgaagtcgaattctccgccacgattccggctttccggtttccagtctgagtaattgtagttgaaccggagtgcgcctcctatttttaacctcggtttttcctgcgctgtcacaggcaaaatgatatttatcgccaaaaggaatggcaatagcaaactttctttatatcgcataaagtcacgttttggcaaggcatttatccaatacctcgcaatggtttataaaatgattttcttaaagcaggccctgtgtaatttctaagagaggatgaaaagttatccaatacgtaaaatagaactaaaggtacttaaaaagtagctggccttcgcccgcaacttttacaaagttaagaaaaacaaatgaatataccaaaatacaataaaaacgaatctctaaacaaatgaaatagaaaatagatcaataagaattttcgcacaaaaaatgggtatgtaattcaaactgtatcaaaccatgttattatttactgtttacgacaatatcaagtctacaacatattgagatccacaagtaaactctaccatcatcatggtattttcatactgatacagtttgaattacagtctatctaataattatcctatgttttcaactacataagaaacattaaggattgtcaccctgataattctcatattattatgactgaatattgttcaaaagacaaaaaatcgtatatattttctatctatagatacaacttacatacgtttacctctatggtctggtgagcttttcaactgtccactcggaatagtccaccagcaggcaatgaagaaaaagcaaacaatagaaatccagacagaaataaaagaaaaagggattgtaaaaaaatacacaacaatagaaaccctctccttctgtcctcccctatagagatttctcagaggaaagtccttatcatgaaaaccgatcaaggccttttctaagagccgaaaagcaatcgcacacatgaacaacacacaaccatagcaggccataggtacagaagacagatagtttttaccaacccaatctgtagtaaacggtatcagagaaatccaaaataataaatgaagattggcccataatatcttaccatcaatacgctgggcaacttgcaagatatgatgatgattgatccaataaataccgatataaacaaagctgagtagataactgacaaatacaggagcgacaggtcgaagcgctacaaatgtcgtctcttccggtgtgctcatagaaaggaccataattgtaataatgatggccaatactccgtcactaaatgcttccaagcgatttttgtccatttttctatgtagaatattaaaaaaacgttaaagcatagaaacttctatagctaatatatgcgattcggacaaacattctatgctaacattttccacttcccatataccaataccatcacggcgtgaaaggatctgtccgtttattttaacatctccttccagtacaaatatatatactcctgtattctttttattcatcaggtatttaatgcgctgtttagaatcgaatgtgcctatggagaaccatgcgtcttgtaatagatgcgccggggtattacctcctttaggcgaaataaacatacacaactcattgtgcttgtatagaggccgaatatcataattgtggtattcaggcttcgtttcttttatattcggaatgatccaaatttgcaggaactgtaactcttctgtctcacttgcgttatactcactgtgataaattccggcaccagtactcattacttggatctctcccggagtgatagtactctcattcttcacgctgtccccatgtcttaaaaagccttgtagggggattgaaacgacttccatattgtgatgtgggtgcatgccgaacccttttttaggagcgactgtatcatcgttcaacactcgtaaggctccgaagtgaactcgttctggattgtaataatcagcgaaactaaaagtgtgataggtcttgagccagccatgatcgaaatagcctcttgtagcagctttatgtactataaatttcatatttaactatatttatttgatatttattttttactctcattttctgttttttttatcatccgataacttaatgcccttccggggcattaggcgtaaatactgtctctctatgtcgataagtattttctcaacaagttgatatcctacaccttgtcctcttaagggaagaggacaaggtgtgtgtcaaatatatctctccattagatactctattttggggacaagactctcaatatggcattcatattgatgtctttccacgttgtctatcaagtcataatcctgagtcatttttattttatatttaagtaagttattttacacattccttaaaactgtaacatacaaagcggattttgtctgacctttatcaaattcgcattgatgttcccaaacattactcaaagacaagaaccctgtcacccacagccttgctctccttgctgtccggagggcttactgggattccaaaaggcatttgagccaccaattcccatgaggaactgatttgccattcttgctgtaccatttcatcaattaagggattataatgctgtaatgaaactccaaaacccgcttcttccaacatgctccaaatgaccaattggtgcatggcggaagtctgttgtgcccaaataggaaatttttccttgtaggtcggaaaagtctcttgtagttggttgacaataaccaaatcctcaaaaaagagtaccgttccatatccggaagcgaaactcttgtctatttttgctgcagttttcacaaatgcatctggaggaacaattcctttcaaaatgcttttggtctttgcccataattttttgtgactatccctgagtaataatacaacacgtgtggattgtgaattaaaggcagaaggtacatttcttattccaaattcaagtatttctctgatctgctgatccgggatgggagaagaatttgttatctgataataacttctccgattctccaatgcttcttttaaactccttgacatagttgatgtgatttatattaacatatactgaatgctttcgctatgtaaattctttgtgcaaaaataagcgcaataagcattttgagaaaaggaaaaagcaatccaatagttgttcaaagcaaaacaggatttctgcttttataatatcaagatcctagttgaattttgtcaaataacatcttaatagatgccgattttaccttattatgctgttgagtaaagtgtaaatctgtaacttcggaatgggtttccatagtaatcaaatcgtgagagcgttttttacggtccatattttttcagatggttaaagtctttaatctcattttcgtacataaatcaacctgttaatctgaaataagatttcgataacaactgtttgcattggaataaggaaatcaaacatcagataaaaggatatttacaatactcctataaagtggactacggtgtaataaaccataataagcaatgaagcttttagtattattttgttaacttaacaataagttaacaattgatctaaaacaggaaatcgtaaaagcgacactagttaaaacactattggataaaattccatcttacttgtattcaagaaccatccttcctacaattcagcaagtttgtggcgcatcaaagaaatatgaggtgacagcctgcaagctaagtttttcggctgttatccgtttatttcctattataaatagattccctcttaacttcacaaaaaattccgctaggagatcatatatccttgccttgacggattacttgaatacaatggtttgttctatacttaacctgatatggttcttttttggtaaaatccaatgggaagcgtcggcatatgaagtgagcattccagcactcctgcacggccatttcatggaacactataaccgactgaacaatgaatgctgtgaagccatcagcaacaggatgcagggcgtagtgagaagaaacggactgatggcattccgcatcataatggtacagacaattgttaggcatctggcggatgagtgctatcccgatgccggaaggacaacctctgagactagaatgtactaatgaggattaccatatgtcactcaccatcgccgtatcattccgcatatatactccgccagttggagaagcctgtcaaccctacattgacatccaacaggaatgatagaagagagatccagtataatatgttgcccgacagctttaccaggtaggagtacctgtctgttgtcagacagttggaatacagcgagaatgcctgtaacaaatggattgaccgatatatagcggaaaatctactccagcattgcggacactccaagtacgagaaggttcggatagatttaccagataccctttcttcaacagctccaccataacggtactgtccacttcgtgagcttgctcttatacaggctttgtaaaagtcctaaactcaataaggacttttaccagagagtgagaaagtcccatgaggcagggagcgtctatgccgcatattgtctctacacccgacaacaagcaagctctttcattactttatacaaccataaaaagcgaggactccgaaaaatagaggccttccatctttgtcaaattattgaaaatatgcaaattgacgcacacgaaatctgagattataaaccgtacgacatgtatttacacaaaatactgaaacaaccaaataatttggaacatatttcacttccaccaagattttcttggcgggggtgctgtcgccgcagatgatatgtcgtacttcagtctgcccattgcgcacatctaaatgttgttgatacgtgcaaaattactaaaaggagggcgcagcacagtggcaactccgaacttttgtttttcaatttttcaaaaaatcgcatgtcacattttctcaaaaacaatagtcgtaaataattgttattcatatatttacacacttaacagtcctactgtggtaaattctccgctttatatgcctctttcgccctataataggtgcttaaactaccaagctatgcgcctttcataggcaaggagttttgcagatcggatacaatttcatacactccatgggaattagtttccctttgcttgaggcagtcaatacaattctgaaatgttgtgtcaccgatacttttggcgtactccactgccttgtcgtaatgttcctgacaatcgattttcattatgtaaatatttaacatttataacagtacagttccttcgtaagccccgaagccggtacactctgctataacaaagtcttccatgcttttatcagccaatgctttcaggtcattcaagccgttgctgtaatagaatatcccatcgtccttgtccgtaccggcatccatagtcaaaacaattcagacctctgtcgtttccaatgtatcgttccatcgtatcacgtaatctgcgtaatgaggctcatgtcctttttcagagcagtattccagatatctgtttccaatttcctgtccgacttcatccgtttttttccatgaactgtcatccacaatttcaaggctcagcccttcgataaacagctttatgccgttatcatataccataagggtatgcttgcccatgtgcttttcgtacatttccgcttatcaaaagaatagtattatcaaaagtagccacttaaaaatgttgttttttgcatctttaacatggctactttaaaattcatctttggataaaattacacctagcttttaagaaatgccttgattttttttagagtctttgtcccatgatttcatttcaggcgctacaatgccaatatctacatatgttttttctaacgcttctcttttaatgaataaaatgacaatacgctattgtcgtagacgtatttaatatcttaatgttttatacattgggattttctttttactgttctgaactataaaagatactgaaaaggcggatgtacatctatgcacccgccatgttaaacaatgcactgttcctatttacggcaacacaattttaaagttaggatctgccggttcgtaggcactacagataacctccatagctttggtgtttcccgttgttctcaccttgttcgtctttaacaaagtttgcaaatccgttctgccaaaaaacagtttgacaaaatccatttttgcaatctccagagtcaggtcagctttcttatcctgactgtcaaggcgatgattcaatacttcgttattgagcatcagcatcaccttttccttagtatcggtaaagttaatgttgatgactgcttcttttccggcagctttctttccgttcagttgaatggcacaatagtctagcaaagttcccatatccatctgggccagtacaccgtcattgatgagttgggatgtataaggcacatccttcttaaacaaatcacgtgctcctgtcagatagaagttgcgccacggaccgctttccgcctgataacccagttgggtgtatgtgtctgccaataattggcgtgcttccttgttttccggttctgcaaagacaagattgtccagcagcgtagctacccaacggtattcacctttggcatacgataccttggccacttcgagaactttatctgcgccgccaattgcttctacatacttggcacctaattccgagggggggcagcgggttgaggtgtgccggattaccattgaaccagccgaagtaaaggtcatactgtgccttcacgttatggctcagcgtaccgtagtagccgcggcagttgaactgcgatgccagcgaagccgggagtttcatttcctcggcaatttcatcaggtgtcagaccacgattggccaggtgtagggtctggtcgtgcagatagcggtacatatcgcgttgtgcctcccaataatccacgatgcgttcgttaccccaagtgggccagtgatgggttgagaatgacacttccacccggtctccgtaacattcgatggctgtatccaccgccttgctccacagtagtccgttgcgcactttcgctccacgcagcgtttgcaggttgtgcatattgtgcgtcatgtcttctgccgtacagaaagctttcagttgcggaagccagaccatgatttccactggagcttccgtatcgagcacatagacaaactccatctccacgccgtcgatagtatgtttctctcctgtgtttgctatttcgatagtaggacgggcgatgcccttgctacccgttgacatacgctgtcccagaccacaacccaatgtacctttttcacccggttgcagccgtaagccatacatgtaagcagcacggcggatcatggttactcctgccagcacgttctcgttttgtgccgaagccatgaagcctttaggagcgatgatgtcgaagttctttttagatgaggcctccttcaccgctgcaatacctccgtaatggtctccgtgggggtgggtgaaaatcacgccctgtacgggcaggtcggccacatgctttttaataaggtcatagcccgccttggcagccgcattggtagtcgtcacatcaatgataatccagccattgtcagaacggatgaaagtcatgttggctatgtcgaatcctctcacttgataaagtttatcgggtatcacttcaaatagtccgttgatgcggttgagttgcgactgtctccacagactcgggttgactgtctgaggagtattgcccttcagaaaatcccattcttccactgaataagaaaccttgccttctttgtccaacacagcgtttccgtcaatgcttgcaataaagccccggttggcatcttcataatcctgacggtcgtcgaaattcagttctgtctttacagcttcgttggcacggatagtatgttccgttgccggtttctgcgcccaaagaactgacggaatgaccgtcagtgagagtgccatagtcaataattttttattcattgtcatattgatttgatttcgggacaaagtaacggatattttttacgtctgtaaatgtgcttttctgcatttcgtttgtatattcgtacgattattaagcattaaatactttattaaccctattaatatgtctgttcgtatgattcagcctgtttttacattcgataaattgcttcaacgcttacaactggataaggaggagactcctttcgttatctggcacgaaaaagacctttttggtacatacgataatccggtaaagatagacataccctgtcttttcttgtgcctggacggagagatgcagctggacatcaacttgcagccctatcggttcaaccgtgaacacctgttgtgtttcatcacgccttgtgcctgtcgtattgtaagccgcagccccggcttccggtgtgtggggctattgctttccaaatctttttggcggcagctcgtttttgcagaacgtaccttgggaaagattgcgatacgcgatgctttcattactgtcgatgacgatgagcacgaacggctgacacgcttctacgaactcctgtgtctttgcgccgatgctcccggtttgcaggatttcgcaggaactctttatccgctcatcctgggtatgttctgtcaagtgcggaatatctgccggcggctggaagacatcgccatacccatgtcgcacagtgagaagatcttttatgatttcctcgatttgctacacactcactaccgcaagcaacgacgtgtatcattttatgccgacgaactttcactgactcctcggcaccttactactgtaatccgactggtaagcggacgcagtgccgcacggtagatagaggaatacatcgtactcgaagcgcagatcctgttgcgcaattcacccatgaccataaaggagataacctatgagttagggtttaacgatcagtcgctcttttccaaatatttcagtcgtgcttcgggtagttcccccgagagctaccgtcgttcttctacaacatagagcatccggtcagactggaaggtttttagcctacttccccagggggtcaacaaaaccattatcaaagacagttgagatagaattaggatcagtcatactttatctggttctctatttcacgctctcttttgtaatagtaataaagggaagttgtactgccgaaaattgaaatcaaggaaattcgatgaataaaaaaataaaaggagtcgtttatcaattaccttgggaagttaatagactttttttcggagtaaagcaattatatagcaatatcattgaacaaattcactaaaaaatgctatctttgcatcaataaaagagttatttgaaagcatgagaaatacagtgattatgaacagcttgacatcttcttatccgttgcccgttctcatgcgagttttctacaaatcgttggtaatcaaataagatacttcagattacaacaaatataatgatttattccggaatgccacgccttcgcttgttttacgatatgatattgatatccgatagtttggaaaatatttgaaaaaccttcgttgtatgcttttaaatttgcttattacacttattacacgttgtatctgacaaattgaaaatcccagccattctttcaatttcttacctgcaaatatagccctttgccgggttgattgcgcaaggcggcccctttcaggggctggttggctaaaagaaaatcatcctcgcttcgctgcggtattttcttttgccaagccttgcgcaatccccggcaaaggacagtccggcaagtaagaaaccgaaaaaccggctccacggagccgatcatgtcaaacaaactaaaaaaatgaaggtatgaacaaagagacaacaagcaaagtccacaaaggacagcagagtgccaatccgaaaatgagaatgttggtttatcgggaaaggagctatcccgcacggaaggtgcaaggcagggacggaagctatacggttgccgcagacagcctggtgccggaactgctggacggcatcagaagccttgacccggcagctttcaagctggacgaggaaatcgcctgctattgctcggacgaggaaatccaaaaactggcggacgaagaactggtagaaataatttatgaatggcaacggttatgactgaaacaacaacagcaaaggtccgggaagaacaagtaacgggccttaccgcagagaatgcgcaccgggtcacgatgatccgggaaaagggtacggaccatccacccgtaccgttccatttcagaaaggagcatcatggaacgggcaactatgtacacctgtacggaaatccggaagatcggaatgaattgcattccagggacttcaaagactgggaagccgtagcgttcaaacatcctggctatctggaggatatgtggaaacaggcttgcgacgcatacgcctggagttccttcgacccggagattcgtggcgagacggacatcatgatttacggggaggagctgcacaacgacctgcaactcatgcaggaagaggaacgggatacatacatcgccgcctaccggaaaaagctatccgcccagctctcggccctctcacgctgcgccaacccgatggtgacgggacggggcggatttgattaccacaggcaggagaatacgaacagaagctatcagaaccgctacgaggagttccgcaattggcggcaaaaggttcttgaagccgtcagacggaaaaaggaagccgcacgaccggaggaagaaaaactggaaaaggcatggcagacgctcaaacgcgacatcaagagcagcgccgacaccatccacgggattgacaccggacaatgccggggttataaccgtgccctgttcgtcagcagcatcctgaacaaggtatccaccttcgccaatcacggggaagtggaaatcgtccgcagggccgtggacttcatttccgaatataacgcaagggtaaggaaacccgtcatcaccccaagaaacaaattcttccaattgccggaacttgcggaacggatgcgcgaaaggctgaaagcggtgcaaagccgggaaaacaaggaagtgccgttcgagggcgggacacttgtatggaactatggggaagaccgccttcagatcctgtttgacaggattcccgaagacaacagacgaaaggaactgaaatcctccggattccgctggtcacccagaaacaaggcatggcaacggcagctcacctccaatgccctcagtgccgccaagagagtgttgaaccttcaaaacatctgaaccatgaataacgacaaactgaaattcgtagtcgattcacgcagttttgacggcagctgcgtgaccaccatgtctgacggaatacacggcgactaccatcatgagacactggaggaactgagggacagggaaaagaacccgtacctcatagccgtgtccggaaataccgtccgcaagatgatacgcatccatctgcaatccctctgcgccccgttcagtgagattacggaagaaagatatttcgactacatggatgtcttgccccccatccgccatacccggaatttctttttcctgggagagccttatcatgcggacatctaccggttctgcttccgggcgggcggacgctacttcacgggactccgctccgttaccacgccaagaaaggaactggaacggcagatggacaaccattaccggaacattaccttcaaaggagacatcctgaaagaaaagccgatggtcatctctgaccacgcacggcatgcctctataattatagttccttatctgtttcttgacataaatggcgagaagaagttcatctgcaacctgatgagaggaacggacgaatcgtcaggcagggatgtaaggctggaaaccgccaaaatcctgcgaagcctgcgccgtcatcatttcctctacttctccggctatgaggaaaacgacgatatggacaagttcctaggcgaagtgatgaagaaaaagcacaccctgctagcaaatggcaacttcctccaatatcccgtgaaccgggagtccgtgtcgtttaccggaacggtcagggaaacaggcgagccgttcttcttccggatttacgacagggagctgttcctgcacctgttgtacgccctgagaggcatcaaaagggaaaaagctaaaatataacgtgacacataacgacggtatggtgactgtctttccgacccgtcaccatacaaaaaaaacaatgagatcatgagaactgtgaccgaagaatcgttgcgacgcaggctggcccgtctggagtcggctctggaaagcgaaaaggcacgcctgagaaaagtatgcggcggcatcccctggggagccgggatgaggcgtaccaaatgtaccccctcattccgaagggaggacgaactgattgggaaaatcaaggcggtgagacagcaactctcccaaatgtccgcaggcggtgacaatcacacgtttaaagaaacaggcaggtgaatgccggccaattaacttgcaagtcaataattttaaaaccagttacgaatatgaacacccgattggctataatccgttcagagggaaaagaacatctctgttaccgggaagaggaatgttttgtcgatgtatcctatccgatggtgacatttaccaaaggggaggatgattttgaaattgtcaaatgcgaccatccgtccatggaagagactttcctgtatcaggaaagccgtctctcaatcgtgattgaaatgtaccataacggctggccggcattgtctctgaaagatcccgtgacccatgagatatacacggtcctgacggtcaacttagaagataaggcggcattctcactgcctgacagggcattcgtggacatcaacaacaatcctgatgccatggagttccttctgtccaacaaattagctgaggatacaggttatagacgtcagagcggctgggtaagctacccgatggtcacacttaaccttccgacgttttacaggcttgacccacatgtctttagcgcaatattgaatatccggtaatccttccgggcaatgaatctggcatcaacaatcaatcaaatgaaaagaatcatgaaatatcaagcggaaaataccgtctccagtttcttctactacatgtggaacgcctggagcgaggaggaatgcaaagccgtgtatggcggcatgtacccgcatttctgggaaaaatggtgcgtggcgacaggcaagggcacattcggcgcggcggaacggttctacctggaactctcggaagacaaccgcaggattctggtggaacgggccgtctcgatatatgacggacgacgcttcagaaaaaggaacagtaaccccaaaaatcaaacagtatgcgaggaaacattatcagtctgatcagcagctcatgcggttgcagtcaaacgaaagcacgggagtacctggactccgaaatccggtatctgcgcgaattgcaggaggcagatgatttgagggaagatgacatggaaacggcctgtctcaacctcggtcttgaccttgactaccgggaatattttatcaaccgcctcgcaggggcataaaaaactcatggctatgacttattttcagaacatacactctctggcggacttgaagaaagaataccgccggctggcattggagcaccacccggacaagggtggcgacactgcgatcatgcaacaggtgaacaccgagtttggaaggctttttgaggcttggaaagacaaaccggatattcccgcgacttcaaccggatatgaatatgactattcgggagccacggcaaaggaatacaccgagtatgtgtataacgaataccgctggaaaggccgcaattacaaggggcagcatgcgccggaaatcgtggcactggtacgggcatggctcaaggagacctatccgggatacaagttctctgtcagacgggagaattgccactccatccatatccggttgatgaaagcggatttcgaggcgttcaccaaagagtccggaaaagttcaaggcgatgtcaaccactatcatatcgattccgacaaatacttgacggacagggcaaaagatgtaatgatgaatatctgcgatttcatcatgtcgtacaatttcgacgacagcgaccccatgacggactattttcacaccaacttttacctgacacttggaatcggaagttacaaacagccgtacaaggtggaaccgcccagactcgacagcaaagacaaaccggaggtattcaagcatccggaaggtccggcacacaaggcaatgcgccgggcattgggcaaagcgcgtttcggcttcatcgaaagccggaagtatgccggggaaataattctgggggaagactgtttcggctcacggggcgaactctatttttggccgaaggaatattcaagcgcaaaaatggcccaaaaacgcatcgacaaactggaggaagccggaataaggtgcgaactcaccggttataacggaggatacatccgcctgctcgggtacaccccggagatgagagattccctggagcgggaacgtcaggagtatgccgctgcgtatcaggcatggtactcaaaacagaatttgaaaacaatctgattcagaaattatggatacaaacaatttggacaagtggtggtacggacttccggaaaacaccagacaggctataggaaacgatgagatatgggaaaaactggatatgccatcccgtttggcgctacaccggtattccctgcttagaatttacggaacggcaaaagacagggacgaggaacgcacgctgctcaatgaaatcgcgtgtggactgggcgaccttgcccttgtccgtaaaaacggtatcgcgttggaggaaatgtgcaacgggaacggggaattttacgatgaataccaggaacagttcaacatattatatgacaattacggacacatactagaaaatataagctggccggactggatcggacatacaattccgacaaacagggaactgatccggttattggaacatcacggttacaagcgtatggaaatcgataccgacagaagaatcccgaaaactttctatgttttccgtcgtgggttgcacatcaacgcaagcgaggacttgtcttaccacatcataccgcaacaggacagtttcggactggggcgttttgcggtatgcgctaccaaagagggtgaaagctcccaactgggaactgactgtgcccggctctttttgaggcgcttccttgccttcctgaagggtgaaagaagcgggaaagagatcatagatgaaatatgcaacaaccgacaaactgaacgatagtatgaaagcaaaagtgttcaagtacaagtctgacgggaataccgtcgtggctccttatatggaactggagccgtatgcggagaatgtatatctctccctgtctagaaagaacgaatatgggaatgaggacgatgactgtttccatgtggtctgccggattgaaaacgtttatttttccagcgggcagtattcacgccggttcctcaacggagaaaaccgcagggaggaagccgccgcctattgcaggaactggatcacggatacgcttcagggagcggaaagaggagccttcgtcaagttgatctccgtccgcgtgttcgaggctctcggacttgacaccgcccccctgacgcaagcccgtgaggcatacaaaaagaagcaggaacagaaacgcagggagcgggaagagaaagaggcggaagagcgcagagcgcgggaagagcaacatcagctgctcgatgaacagaaacagaaattcctggacggggaacggatcacgggaggaatgttccttgaaatcaccggaagggatggttttgacatccatatcagaaccaaagggacattcaacaggcatgtaagaggcattgacaggaacggaaccatcagtttccggaaaatcaagggccgccggacaccgaactttaccggatgccataaggccgtgcccgcctatcttgcgttcataacagaaaaagagggcaaacaataaaatccgggacggtaacggcttgttccatgcggctgttaccgctaccatcttccgacctcacaactcacggttcagcgccattgccagcggaaacatcaaccggttataggctttaagcttttgtaggttcagcacatatccggcataagggttggtcaaatcggtgtagaagaatacatcggtaaatcctgcatgttcttccacaatttcaccctccaacggaatttcctccacattgaaccgctccagaggcagctcttccagacgggcatgctccacattgcccaatacgttcaggttgcggttaaacagcacgaaccctttcttcctgtaatccacacgcataccatatggacgctccacaaggaaagcatccgccgctttctttagatagttttccataatcctgaaattagaaattgcaaaaatacagcatttgtccggcaatggcgaacaaatcaggaagattatctaaggaatccacacaaaatcccacaacaaaaaacaaccgtatattttatttcccaccctgcaaaggtagtcccgcgtcctgtgtacccgtacaaggtcaggccccttcggggttggctgaaagaaaatcatcctcgcctgagggctgcggtattttctttcgccaaaccttgcgggtacggccacgggactgtcaggcaggcaagaaataaaaataccggctcccggagccggacgtgtttaacagataaaaatacaatgaatcatgaaaatcctgaatgaagaacatttcgagaatgtaaagcgctatgccgaatccatcggtgacacctcacttcaaaagtgcttggaacggttgaagagttgggaagggaatcctgactatcccagtgagatttcactctactatgaccatgccccatactcgttcggctttacccagcattatgctgatggaagaataggtatcgtaggaggtctgctctatcacggaataccggacaaatcatttgccgtaacattgcagccgttccacggatggcagatacatacctgaaaaacatgaaacttgacaatggacgaaaagcagacttcaggacagagaatccgaggtctgctttttcatttcttgctgtaaagatagccgttttccgggctgattgtgcaaggcggcccctttcaggggctgggttggctgaaagaaaatcatcctcgcttcgctgcggtattttctttcgccaagccttgccgcaatccccggaaaacagactggaaagacatcaagaaataaaaatgcctacccatgtaggccgatgttttacttaaaaaagaacagatatggaaacactggattataaccagctgctgcttgtctccctgtggcaatacaaccaccacggggatgaagggctgactcccgcacttttcgaggaaacgttcggaaaggtctatggaagtcactattacgaaaaatggaccggctgcttcaagcagaatctctgggacatgattgcctatttcagaagcgagaaggagaacggacagaagttctgcgacatggttgcccgtcaggtcaaattgtatcaacaaaaacgatctcaatatgaagtacggtaatttttatgacctggaaagtctgactctgctcaacaggcatgaagggtgtgcctgctccataaaagaatgtgatgtggagaaggtgaaccggatgatttcaaggatgcggcaggacagggaaagagtcagtttaccgaccgcaggagacgttgtcacttatatcacccgtggcggtgactattatccgcaggcacacattgaaaggggcgatgaccgggaagttcatatctgccttttcccacagacacctttttgccatgaaaatgaaaagtgtaccggttacaatacggaaggaggcccttgggttacaaccggtccggaattgctgattcccgatggcatacgcagcaaacagttccggatgtgggggcataccggaaggcacaggaacggtgccgtcctcttccacacattcgtcagggcatggaaatacacggaacccgatcctctgtacggaaagtacaccacaaaagaatggacgagatacctcatcgagtgtcagccggatattgaaccggctgatgcctttgtctatcggaatgaggcattcaccctttactcgcgggaagaactggaacggctggtcgggattctgcacggaaagcttttcaacggattccgtcccggtctgttcatactctgggcataccgtatggaatggaaggaacttcccacatgggaatggaacatgctgaaagcggacacccatctctctttccttggcatttctcccgtcaggatacagactgaccataaaagacatatagtaacaatctataaaaaatcagagtaatatggcaccatacaacacaccgcaggcgatacgtccgcttgagaaaatggtctgtgatttcgcctattcgaacggctacgatccgatatccgttttcaacgatttcctgcgttatgtcattcacgggttctctcccggcgcaccgccccttatggactggaaatacaaacggcagcagaacaggcattttatggagatgcttaccggatggatacggctcatgcagcgggaattgcaatccggcggatggtttgatgcgttcggtgacctcttcatggcaatatcttccaaaatcggtcggcaggtgaacggacagttctttaccccgccggatatctgcgacctgatggtcttatgtaccgattcgagggagacagcgacaggaaaacgtatctgtgacccgacatgcggaagcggaaggctgctgctggcatatcatgtacgccacctgggtaattatctggttgcagaagatgtcaaccatacctgttgcctgatgaccgtttgcaacatgctcgtacatggctgcataggtgaggtcatccaccatgacagcctcttccccgaaaacttcatggacggctggatggtaaaccatacactgactcagacgggcattcctaccattcgccggatgagcaaggaggaatatcggacaagcaggaacatgtccgttgacctgctcagaaagcggaaagagaaattgcgccaaatgcagccggacaagaaacaattgccatataaacatggcagaatttataaacaataaaccgaatgattatgaaactgaatgttagcaatgaattgaaatcccgcctgatgcatgcggcggaaaacgggagtgtgatagccaaagacatccttttggaagtaaaaaagaacgtaccggtggaagagatcatacgcggtacctataactgcttctccaccaagcgcaagcggacggaagcgggcacgttcaagaaaatccggatcgtgttcacggcctgcagcaaggatttggcccatcccagtttcccggaccggaacaacccgcaggcaccctggttcccggagaatcgtacagttctggaaccctccacgtttgttgaactgttcaagaacctgcccaagtactcacccgacgaaatcaattatttctgtagcgccctctcattggacagcaaagtcacggtcaggctgcatgaaagcatgaacgacttcatggaagcctatctggaaagcaactacagccccatcgccgacagtgacacatccagcctgcacagttcctgtatgagatatgaggacaaggcacgcaacgccgctgacttctataccaacttcgccggcgctaaaatccttgtggcaagggacgagagcaacaacatactcggacgggctgttgtatggaacgaggtaacattgtggaaatcaataaatacaccgattgccgcctccctgctggaccgcatctatttctcacacgcattcgtcgctgaactgatccgcaagcaggcgcaggaggcgggcatcctgttgcgacgcagatacaacgattatacacatacaacggatttcaccgtactgaatcccattgagggggaggaatgggcggtcggagacaatatacaggtttcattgacggtgaaagtgcccgcctgtaggtggcacaagaaaggggtgccttacctcgacacgttctacagtcttcatctgacggaaggcaatctggaacttagaaatacggagggcgacacaagcatagcctcctgccggagcacggaagggtgcgcaaacaggagaaaatatgtatgtcccaaatgcggaaagatacatccctttccggatatggcattctgcaagaattgtcaagatatgttctatatatccaccgtattcggaaaagtattgaaaggcacgtcggtggaatacaagggaaagaaatatccgtccttcctcttcaagaagggacgtcccgtaccggagttcagacggtacctgcaaatcgaaaagttgttcatctcctaaaaagtcagtatcatggaaaaattaatggctctttacaacatctcctccccctccggtaaggaggggaagatagccgggttcatcatcggggaactcaggcggatggggattcctttccggcaagaccggtacggaaacatctacgcggtcaaaggcaaccgggaaagctacccctgtgtcgtggcgcacatggacgaggtacaccgccgcaagacaggctcctatgcggcccatcttgtggcggactcgatgattgtcggttatgatcacaagcgtaaacggatgaccggaatcggcgcggatgacaagaacggcatctggatctgcctgaaatgcctggaggatttcaaggcggtgaaatgcgccttcttcgtacaggaggaggtaggatgcataggcagcggccatgccgatatgtccttcttttccgattgccgtttcgtcatccagtgtgaccggaaagggaacggggatatggtaacacaaatcaacggaatgaagctctgctccaatgacttcatttcagctatcgatttccggaggtacggctacaagcctgcacaggggctagctacggatgtggcggcattgaaaaggaacgggctggaagtatcctgcgtcaatctctcctgcggatattatgaacctcatacggacaacgagtacaccatcctggcggatatttgcaagtgctacaggtttgtccggcacatcatctgttgccataaggaaaccagcacgcatataccggaaacggaaagaaagcccttccccggatataatgaactgttcggaccggccggatatagcgaaaaggattatatccgtctgtcaaaagagtacagatctgaatttactaaaacaagcaagacaagccataagaacaaattgtaatttatcaactttaaaaacaaaaaatatggaagcaacagtcatgccggccactgcaccggtacagaaacagcagggactcaaccaggtagtcatcaacaaggtacggagaatgatagaagacaggcagggggatgtcatggacaccatcaaccgtctgctcagtgagggacggatcgcgcaggatttcatcgctcccatcggggtaagccaacgtagcaaggaacgccccgttatctctttcaaagcggaaggaagggtacagatggcaatgcccgaagggaacttcaacctgcacggcaacgccataagccagatttcggagaagatgggcattcccgccaaatacctgcgcgagctttccgccggagatgcctggcagaaacagttgtgcgccaccatcctgaacgaacattcgggatggaccgagcgtacacgggtactgatacgtgcggtaggtatggaggtccgtggcgtgttgtcggactcctaccgccggctcaactcggtggacatcctgaccgctttcatccgtgaggcgggaggacagggggcggtcgtgtccgacgcctatatgaacgacacgaaagtatggtgcgaaacgatcctgcccactccgatagagatacccacccgtaagaacgggacggtcatcatcttcgcaggagcacgcttctccacatccgactatggcaacggctcggtggacatgcggtcgttcctgctcaacggggcgtgcctgaacgggatggtccgggaatccgtcatgcggcaggtgcaccttggaggcagactgccggattccctgtccctttcccaaaagacctatgaactggacacgcagaccaccgtatcggcagtttccgacctgaccaaagggctgtacagcaaagacaccatcatgcagaaggccatcgaaattcaaggcgcatcggaaattgacgtggattttgacaaggaactgaagaatctggtgcagaaaggagccttgttgaaaaacgaaggacacgaggtcgagaagctgctgatgaacaacaatcctgacgacggagtgacaggcggggccacgctctggaaactgacacagggaatcaccgcctttgcgagggaacagcagccggaacgctgccgggagctgcacgaaatatcggggcagctgatgaaccgggtaaaggtaaattaagagtggctaagacaaaagccgtgaacggtgatgaccggcatccgttcacggctttgcataatttcaatctaaggtatatagaacagctcaaactcctcttttcttcttctctctatgcttggaatgactttcccccgataacagcggaacgatatatattccttatatatatcccggtcgccactttccagtttttgaatcagtctgcttttgggtatcttcccgttcccaatcagacggtaacagcccacattaaagcctaacagacttaaaagcagcgagtcttttccatatttacggaataccttcaggcaccgttcaaggtcgcatctcaaaagtgagtccgcctgtgcctcgctcaggttctcggtcagcttctcgtgggggagcaggcggtgcccaaaaccgatgtaaggcattttcccccgatgccagccttcccaccgtttgatgttggaaaccgccttttccagcatggagggcggatcttcggcacgaacattcaaagtgaacggcagtaccatcagaataaacaaaagtttcctcattccgttcaattccttacctccacatccaacgtgcaatacgtatgtccatccccgtagctccaccttcttcccgttacggtcaccacactttccgccaggtattccgcgagggactgccgttccgtttccgcattcttttcaaagcagtgacaggccggtgtcgtttccaacaggttgcgggaggacttgtcgagccgtaccgcgtcaatttcgagccggtcccccatattgggaatccggtcggctgattccgacagctgtacctcatgggccattcccggtatgtacaaatacaggtatgtcatggttgtacctcctttccatgcgtatcatccttttcagccggaggggtgtcatccgcgttgaagtcataactcaacctctgcaaattcccccagttatcctcaaaataaaggtcgatggtctgtgacgcatccgcactctgcgaggtatagtacaaccggaacctcagttcatttaacaggtagcggtcattgggtttcaacaccgtaccgtcctccatctttaagctgcctttaccgtccggttggaaatatctcaatgtatagactgttccggagaaatttccctccgctttaatttccagacggatttccaccgtctcaccatcagcgatcttaccgactaccggcatcgactccaccgtaaacgggtattcctgctgaacgtccagttcgctgtcacaagaagcaagagaaagacaggaaactgccaggcagcatataaacgtcataaagtcaacgatttttcttttcatgggtatatgggtttaaaaattagagaatgtatttgataccgattccatactggaagtgggcatgcgtggaagcgctgccccaaaggatgcgttcacgaagccggagcagcagtactaaacggtcagacaggtaggtctctgcctccaacgttatcgcaccaccatagataaaggattcgcattgtcccagcgtggcaccgtcatacagcagtcttttccccccgttcaccgattcatagcccagcatcgccgaaccgccaatgcttaagaataccgttttattaggggaggaaaagatattataataatatccgccttcaccggtatattgcactaaagggatagaaccgtcacgataaggcgtattgcgcttcagtacctcgccgcccagcacccactggtttctcttttttgcataagtggaaaccgccagcccgaaagagaaaccggcatccggcttattcgccttgcagtaaaagccgtccgtcattcctgccgtgagactgacgtccttcatttttggaagacggcgttgtgctcccgcctgccctgccagaagtaccagcagcgcaaaggtgatatataaatacctcttcatcgcacttgcagctcattgatagtttccgcacgcaccagatcctcgttgtccacctcaaagatctgatgacggccgccttgtttctcatacatttccactaccagtttcttatcatcgggaatggtgaacttgggcagggcaaacacagtacgctcgtccttctttccctccacacgaatgacatagttgaacgcacgcagcggataaatcacctgttcctgcatagcggtacgcctcactatcttcttgtccactatcttgaaagtcacgaaatccacgtcaaacggcacatgggtggcatttctcacctcggtatggaaatagagcaggtctccatgcgtataaagtcctttgagcaggaaccgtaccccgaagcgcttgcagccgatgtgtttgatccagtgcttgtcctgcttgtgtacggatttcatgatcagacgtaccagacgcggtgactcactgcccagctcctgcaaataaatttccatcgcgttgttcgggcggttcaccgtctccccgtcatgaataaaatcacacatctccacattaagcagcaacggttcatcggcatacttgacattgaaggtgtaaaaatttccgtcttccgtgatcacgctcatattcgtctcattacgaaaatgctttctggccgctttcacacggatcacattttccgcgccgtccgccttgccggcaatcaggttggtggaaccgagatccacatacttgatgggagaggggaaaatcacgtgtacggtcttgtcgtaagtgatttccagaccatgcggaggtatcatccggctgaagcctatcttgcggctcagcccctcgaaataatctccgccactctgctgcgcgtacgcagccatgaagcccgtcagtagggcaaacatcatcagaatctttctcatgtccgattattgttggttgtttgttgaataattggtttctgttttctcgtctgtataccgtttcattgtttcggagagtgaagcagcagcctgtgtccggctttcagcgtgaccttgaccgtgcgcatcttcttggtgatgtactgtgacacgccctgtatgacgcctttacccagatccgaggctatctgcgctcccgcgtcggtggagatgctgatgctgcttcccatcgaaccgcccatgcccgccgctatttcacgcacggcatcatactccagtgagttgggtatcaatattccttgctgaccgtccgcatcatacacttccagttccaccggaatgacggttccttgatattccacattggtgatgacaatatccatgcgttctccctggatccgtgttccgcctgtcaataccgttcctttgggtatgaggcggtcgtccactgccatcgcttccagcaggcggacacgcagggcttgtccgtccgatacggtctgcgtgccgtgcacacaggcggcaatggtattacggtccgataccggtgtcctgcccaccggcgtatggaaaccggtgttcctttcttcggacactccggttatgaagtccccgtcattcaccggttgcgccaaggaagataccacttcttgtcgtatccgcttaaccggcttgaccgatgtcctgtctttccggtcatccgtagggataacggacggtgtctgtttgccgttgtaccgggccgccagttcgtatgacttttccatcagggccattttttcctccaatgactgttcctgggacggttccatgttctgtcttttttccagtccctcgatacgccggagcagttcctcctcccgggaggtttcccgtggcgtgtaaatggtcgtaagcgagcggttcatgtcatggtaggcagaggtggaggaacgtaccggattatgcgtctgtacggtttccggtacggatggcagttcaaggttcactccgctgtccactgacggtacggtgtctttccggtccttgttccggttgaacagttccgacatttccaggaaagtgtctttccgtcctctctctttcttcgacaaggcttcccgctcgtaggcgctgaccttgttgccttccatacggctctcttcgggagacgggatctcggtattgaatcccctctctttctccgcctccgctttttccttttcggtcggactgtatatcaacaggacaatctccgcgaatatcaggaagaagagcggatagacggcgaacttcatataccggcgcttctcttggagagtcaacggccggtcgcttgggaatcccagctgttttttaatcttctggatatctattttcatcggatggggtgtttaaattgattgtacttttttccggtcgcaagtcaagcggccggacatattctattttcatctttcccccaagctctcccaagccggatagcgaggcgaggatggcatggaggcaggccgtcagaaacaagaggaatgccgtggttgtcacgatcttccgttgtttccttgtcaggcggtggcagaacagccggatacagcagtccatacgtttcaggtgttttttttcttttctcatcgttccgtgcttctgatatccctgttctctagaatggtaaactgttcgatgatgaacccattcggattgtcgtccgaacgtcccgtattctgaagtgagcaggtggtgaccaaactgcgctcggtcacgttgctctcacgaattatcatctgacgggcatacgtcctcgccttgtaagggtaacgggcaaaatcacacaccacgctgtccacatgcaccacctgattgatgttgcccgatatcaggcggttgtaatatcccttctcggcaaaatccacataatagtggtaggcgctcttgtccgccagttgcagggcacggtcgatgttgtggctgatggcctctttctgtggagagagcgagaagaacagctcgtgaaagcgtcttacgtgttccctcgcctcggcaggacggttttgtgaaagatcctgcgaaagggccatcatcagcgacttacccccgtccagtacatagattttctcacgctgcctttcggcgaagcggtacgagctccaaagcgcgtagccggtgacaagagtgcagcagcagataaaaacggccgccatcatacggatgcggcggaagctgctctcaatgttggtcaaagacttgaattccatttctcgaatgattggtttgaatgaataaacaaatatttccggcaaggcttatttgcctctcaaccgtcctccgatatttcccaatacggcaccgcccactcctgccgcaaagctgccggttttcgtggcggtacggttcaggttgcggctgaaattcccggctcctcccgcctgcacgatccagcccgccaccgtcggaacggtaaaatacccgataatcccgataagcataaagatgatatagacactgttcgagttgtctatcgagtagtcaggattgttctgcaattcctggatgtcgttctggagcatcagcacctggagtttggcgagcagggtgctgaacagatcgctgaccggaagccacagatagacggagatatacctcgtgaaccactgtccgagtgtggactggaaaccgtcccatacgctgaaggcgaacgctaccggtcccagaatggagagcacgaccagaaaaaaggtcctcacggtatctatcagcagcgacgccgcggcgaatatcagttccagcaggctgcggaacgtgtcacggatcttcttctccaggttatacatgcccacctccacgtacatacccagccgggaggcggtatccacggttgaccagcctaactcgtctagctgccggtcgaactcctcgtcactcaccagataggcggtttcaggattccgcagcatggcctccttttccagctcctccttctgcgccctgtatcgctccatgtccagcgtctgcccctcaagcatcttgtgcgtaccctgcacaataggactgagcacggtgttcagcgtgccaagtaccagtgtgggaaaaagcaggatacagatgccgatagcgaaggggcgcagcaggggatacacgtctatcggctcggcacgtgccatcgactgccatatgcgtacggcgacataaaagagggcgcccagcccggcaagccccttgcccacgtccatcatgtccttgcagagggggagcatattttcatacagggttcccagtatggtatgtaggttggcaaaatctatcgtcaaaggtaccatgggctaccagtatttggaggtttcatttccatagagccgcatcacacgttccatatcgttctttttcctggcacggagatagctcacggctatgttcttgttagtataatagctcaccagattgcggtaacggcgcatttcgtaataacagttgtccaccacatccatacggtccttgtcggtcatggagagcgtgctcacgttgatgacctgtttgaggtcctgcaacacgccgttgctctcctccagcaggcgggtgtaaccgaaggcgatggcgtccagctcgcgggacgagaagttgtcgtcgttcatcatctttttgaagttcgtcacatagatgtcggacacatcgcctaccatcaggatgatgtcacgcaccttgcgggcgtcctgtatcaggttgttcaccgcctttaactggtcgtagtacttcttggcctgctcgtagatctttaccgtctccgcaaaattgtcggccgtattgaccgccgtcttggaggtatgggcgatgttgtccgacatgttgatgatactttgggccagatttccgggatcggtcaccacccattgcgcccgggccatgttcccgcccagcacaagcattatcccgatcaggaatgtcctcgctctcatgggcgttcctccttccgtacataatccccgttgggtgagaaagtcaggatatccgtctcctcgttgtaggatacatcgatacggtaccccgtattgataaagaggttgccgttctcttccaccaacaggtaggtctgcggcctgaggcggcgtgtcttgccactacgggcgaataccgtcaccttgtaggcctctccttccttatataccaacacgtccggtttgccgtccacactggtccacgatccgcagagtctgtcacggtcggtaccaccgtccgcacaactttgcaataccagggcggccatgccgatcaggcataccgccagtctcataaggggtttgtttctcataatcgttttcattttagggttgatctttgtccttgttcctctcgcattttctctgccagatggcggacggcaagttccaggttgccatccaatctttctgccagccgctgtacttccatcttttcggactcctcggtcgtgaacgtgtaatattcctccccgctcacttccgtggcatatactgccgagtgggttccgccaagcccgatccacacttcccggtagaaccgcccgggatggttcgcctggttgatggagagtatctgccctttttctttctctgtcaggccgagaagccgctggatgtgctcgaacttgttcatgtatttccgttggtcaagcaggattttacagtcggaattgttgatgatggcctccttcacgataggggaactgatgatgtcatccacctcctgggttaccactacggcctcgccaaaatactttctgaccgtcttgaaaaggtatttgatgtactcactcatattggcggacatcagggccttccaacattcctctattaaaatcatcttgcggatccccttgagcctgcgcatcttggcgatgaaggtctccatgatgatcagcgtcaccacgggaagcagtaccttgttgccactgatgttgtccagctcgaacacgatgaaccgtttgcctgtcaggtccagctccttgtcggaattcagcaggaagtcatagtctccgcccttgtaaaaaggtgccagcacgttcaggaaaccgtcaatgtcaaaatccttctcacgcacctttttctcctcaatcattctcctgtagtcatcggcgacaaactcgtagaaaccgttgaaatccggtttgataccccggttctccgaaatcatccggatataggcgttcaccgccccggaaagggccacctcctccgaacgtttcggtgcctcgtcctcccgtttccacaaggtcaggatcaatgtcttgatgctttcccgtttctccacgtcaaacagtccgcaatccgtatagaacggattgaaggctatcgggttgtcctccttgtacgtaatgtagatcccgtcctccccacgggtgcggtcgtgaatcatgcggcacaatccctgatagctgttgcccgtatctaccagcaggatatgtgtgccctgctcgtaatattgccggaccagatggttggtgaagaaggacttcccgctgcctgaaggaccgaggatgaacttgttcctgttggtgatgattccccgtttcatgggaaggtcggaaatgtccacatgtaccggaatcccgttctgacggtccgccatacggataccgaaaggactgggtgagtttctgtaattggtctctccggaaaagaggcataccgcctgttccaggaaggtgtaaaacgactcctcggctggaaaatcacctgcgttgccgggaatacccgcccaatagaggaccggcatgtcgatagtgttataccttggcgtgcattccatcatggccagctggctgcccgtgtcgttcctgacgcgacggaactcatccgcgtcctcggcccaggcgatgacgttgcaatggcatctgacgggaagcagccctttggtatgtgcctcgtccagatacatttccgtccattcctggtttacggcgttgctccggctgtatcttgacagcgagagcatattacgtgagttcttctccatcatctgcaggatttcctgtgcgttgtcaatgaacacgtactgtgaatagatgtggttgcacggcagcagcagtcccaccggcgctgcgaaggagaggcggcagtcgctgcggtccgtggacatcctctcgtaacgcatgtcggtggagagcttgccgggcaggtcctccgtatccgagagggtatgcaggcaaagccgcttgtctccgatacgcatccgtccgggcttgaggcagatgtcttgcaatacggcactctcatcctccagcgagagcgagaggtatttctccaccagtccgggacgttccttcgtgccagtaatctcgtccgtttccagacgccgcagccttatatgcccggaatcgttcatgatgcgttcgaactgttccaccgactccagaaaacgggcagccgtgtctttgtcggttatctccctgggcagcaggaatccccggcagagggtgctgaaatcgctccgttggcggctacgctctcgggtcgtctttgtcaagaacaggtagcatctgtggtttaggtacggtctttcattgaaatgtagttcatagctgcgtgtaagaaagctttgttcctcaccatcacttttagaacggtatgtttcttggatgaaccagtcctgcttacagacgatgctatgctccggcagcaccttcatggcctttatccaagaagagtgcatagtctcatactcgtcctccgtcaccgtgtacaactcgggcagctccacctcgaaagccacggtcaggtcggcgtccttgctcacgatgcagccgttctctactgagagaagggggaatctgcgttctagcgtttccgcctttaaaagtaagtattcgataaactccctcgtagtggataacgtatgttcataatatcgtttattcattttatcgttctatgatttattgttacaccaattcagcccaaagatgtgcgggttttatataagttgatattttccctactaatggagcggataaaaggaagttttcccccttttcccttattttcctgtaataaatgggataaagcggtatttttatccctgctttcccgtcataattagtataaaagggtattctttcccttattttccctatttatcggggataatgaagataaaaacggcactttattccctattttcccgtcttgattggtataaaacggtagttttcccgtgtttaggcgggatttatgaaggtatcaggagtctttcttgggagattccggtggcgtaacggataatatcttgccaccggataacagattgtcaggtaataattcggccagatccatcgagtagtcatcgtcataatcatgtacatgttcaaggaagtagatcagccacgtgcggaagtcagccccggcagccttgcagcagccgaagaacgagtagagcaccgctgcatcttcagcggcatcattattgccacagaacaggtaattacgtctgccgcacgcgacaggccgcactttattttctatctcgttattatccggtctgtagcgaccgtcaagatggtatctggagagtttgtcgaaccttccgtatgtatattttatggcttttccgataggactgcctttcatcactttgggatattcattgaccagccatttctcgaagcgcacaagtatgggatatgcaagacgtgtcctaagttcagccctctgttcgtaagtcaggcgttcatcgtcagccttgcgctccacgtcataaagcagctgtatctgttcgagcgcatagtcggcacgctgcgtgtcattctttcttgcctcccaaaaatatctgcgcgcatgggcccagcagccaagaaggataatgcctttcttggcgtccagcatctcgtacctttcgtacccgtccgtctgtatggctccccggaacttgccgaagagtttcagcaccacctttccacttcgggaacccttgtcatagtaaaagaactgacgtccggtcatgacgctgcgcacaagccagatataacctttgaccgtcttgtgtctctcgtcattcatcacggggattgtcgtctcatccgactgtatgtagtcagtctgcatcaccagatcccataatcggaagtacaggggtcttagcagatccgccacatccttgaaccagtcgttgaccgttgacgcggggaggtgtacccccacacgcttgaactgttccagttgtctgtggaacggtatgtgatccacatatttccctatcatcatgtctgccagcaatgaggcggaggcatagctctttgctatcggcatgacgggaagcgggccggtcctgaactcgtccgtccccttccgtttggctgtatggcgcactatcctgcggatatagaacttcccgggctcgtgcataaggatctcggtcacttcctctccgggaaggagcgtccactcttccggattatacccttcgggatatatatgaacctcctcacgcgcaagattttccggaagggattttctcgtaggatgttgcctcctcgcttttttacgggcgatgatcgcttctctggtagccttcagctccttttccgcttcctctgcggcttcagcctcccggggaagcatgtcgaagccttcaaaatccagccagcggtcctgggcgtcaggctttatgaacttttccgccttcttcccgtacaactgccgttcaagataggatacacgttgttccagactgttgatttttgcttccttttgggcgattatggcatccttgtcagacaataaagcctcatacgcctctttgtccgcagcttcaaggggctgcgtggacaccatctccttcaatcggctgttttctctatacagacagtcgcatttgtgcatgagatcctttatcagtaattccttatcggttggcataatcgtttaattatgatgccaagatactaaaaaacagccggaatgcggcattgtatatgttatagtttgttacaactacaacccatgaaaaccacttcttttataacgcctgaccttgctgccgtccattccctggaccatcatcacaaggtcattccagaaggtttcaatcgctttaacccgaccttcctccgtatttatgaccggcagatggaagtgcccctgttccagcctcatatggtatatcaccagaccaccatattccatatggaggattttcatacaggtacaattcgcattgataaaaatgaaagcgtcaccgtcccgtacattctttcccatctggttggtcacgatgccgctaagcgtataaaaactcttacgcatgtctgtcggatacgggtaaagataatatctgttggattcattcaaagaaaacataggctaacggtttgaattcaaaaatatcaaggtttgcaatacctccggtgacaaagggctgttcaagcggactatgacgccgttgggataggagatctcacatagtggctggggatttggcgacgggctgaccggaggtgcagactgcagggatttctccttatggggaagactgacctctcccttactgtttacctttaccgggataaagccgcctttgcgcaacagcttggaacgccacgcgtagaaacgtttggggcgaatacattcattcgaacaaaaatctataactgaaagtccgctcgacttgaaacgggcataaatagattcaaaatcttccatggtccattgatgtgacataatgattgagcttttttactttggctacaaaagtaacatcacatttttagaatgaaagggggagtttatcgaatacttacctttaaaacatttctcatgatttttgtttttccttaattccgcaacactattacaaatataactttttaagtacctgagcaacaaaaagttgctcaggaatttgccatgtcagatttttcacctatcttagtgttgcaaatcaaaatatgtatcaaacccgacagacatggcaaaggtagcaattaaatccgagaaactcactccttttggaggaatattttcaataatggagcaatttgactccagactctcatctgtaatcgactcaaccctcggtatgagatgcaggctgtatggttatcaatacagcgaaatcatccgttcgcttatgagcgtttatttttgtggcggctcatgcatcgaggatgtcaccactcatctgatgtaccacctttcgcttcatccgacacttcgcacatgcagtgccgacacgattcttagagccataaaggaactgacccaggataacatttcctacacatccgacactggcaagacctacgacttcaacacggcagacaagctgaatacactgctcctcaattgcctattgtccacagggcagctgaaagagggcgaggggtatgacgttgacttcgaccaccagttcatagaggctgagaagtttgatgcgaagcctacatacaagaagttccttggttatcgccctggcgtggcggttattggcaacttgattgtcggcattgagaacagcgacggcaacacaaatgtccgtttccaccagaaggacacgctgaagaggttctttgaaaggtttgaacaaaacaagcttattatcaaccgtttcagagctgattgcggctcgtgttctgaagagatagtggaagagattgctaaacactgcaagaccttctatatccgtgctaaccgatgcagttcgctctacaatgacatctttgccctcagaggttggaagaaagtggaattgggcggcattgagtttgagctggcctccattctcatcgagaaatggaaagggaaggcataccgtcttgtgattcaaagacagaagcggatagacggcgaactcgacctgtgggaaggagaatacacctaccgctgcatccttacaaatgactacgagtcttccgagaaagagattgtcgaattctataacctccgtggagggaaggaacgcatcttcgatgatatgaataacggattcggctggaacaggcttccaaaatcctttatgggagaaaacacggtgtttcttctgcttatggcactcatacgcaacttctataaattcatcatggcgaggcttgacgtgaagaggttcggactcaaagcaacaagccgcatcaagacgtttgtctttaagttcatctctgtgccagccaaatgggtcaggacatcaaggaagtatgtgctgaatatctattcatgcaacaatgcttatgccaatgtgttccagaatgactttggataacaccgacaacttatagtcgtgattttgcgtattgcctcaagtcgcatggtggggtaaggggcatttatatgtctttatggtgacattcgatgcactgtgccccctttttactaacgatgcagattcttttcgcttctgtatcatattaggcgcgtagttgcggatttgaggtttttttcttttcgtgaataatctgaagactctcttgcggtgaattaggtagcgcggatggcgtttttcggccagcagcttcatcagtccgtgttcaccgtagcgggcgtttaaccgaaaagtcatccataccagtaggccaccggatatgctcccgaaggagatgcatatccattggtccacacccaccagatagaggataaccaccgcaaggagcaccatcacaagtccgccggcgaaaacgaacagatattgagacttgagtcccttgaactcgacgggattgcccgcacctttgtttaccggatacttcatgcctctagaggaagaaggaacgcaggatggtggcggccacgatcagaaagatacatgcgaaaaaccagctggcggctgtcttcgaggtatcaggatcgccactggagaacttgccgtaggtcttgataccgcccaccaaccccaggacggccccgatggcgtagcacaacttagtggcgggatcgaaatacgaggtcatgagactggtcgccgcgttgataccggcaaggccctgaccttggccctgcgcaaaaacactggcggtaataaccgcacacatcacagaaaaaaggattcttctcttcattgtcgaatcatttaggtgagacataaatttgaattcgacagcgaatgtaaaatggaataacgtactgtaattcagtgctgtcatcagatgtcaccagatgtcatcaaatgtcctaaatgaccataataatctaagttttgctataatttttagacaaaaattgctttttgtcttttttatacctatgtttgcgaatataatcgtatttatcaacaaaaagctttgtaaaaatatgagacaatttaaagttttgctattgctcatagctatttcttgttccatgtttgcgcaagataggctatcattgtttattggcagggcaaataaatatgcctctgtggaactttcggattaccgaaaacgtttgtgtatagaatataatacccccaacaatctattggatgattattataggcaatgtggaagagattgggggaatgtaggtttggcccttgaaatagccaaaacatctggcaggcacatgcgtgatgtatgtgattattataaacgttaccataggcacggctgggatcgtgttttgatagagataggtataaggccgggatcggtatattacaatcctttctatgacagggtaaattatcatagtaattgttggcatgaacattattgttcatactgtgaccatcaccgaaaacatcatcacaaacattataaaaaacacaagaagcataaacacaacaaacattataggtgggatgatgatgacgatgatgattgggatgacgattaacatttataggtataaaagtatattgaaatgagaaagattttaatttttttaggattgttgtttgttatgttgagtggcgtttatgctcaaaaaggtagacaagctattggattcggactgagttatgggacggaaattgagagtattggccttgggttgaaatatcaatacaatataaccaaccccatacgtcttgagccgtctttgaattactttatagaaaacgacaatgttagtatgttggacataaatatgaatctccattatttatgtcccgtaggcagaagcgtaaagttatatcccctattcggttttacattttctaattggatgtttgacctaggagatggttttgatattgatgtggacggagaccatattcatatagacaaagataatgacaatcataacgaatgcagggtaggagtgaatatcggtggtggagccgacttcgcattgacaagtagttggattatgaatttcgagttacgctaccaactggtcagtgattttgatcaggctgtattcaatttgggattcgcttatcgtttttaatttattctataataaaacaatatcagccctttactgaaaattgcttcagtaaagggctgatatatagaattgagcaagaagcgtattggagttttagaaatgagtgcttacaaccacattcttgtctaagaagaatacaaaaagagtgttcttttttgtatttctgaaaaggatagtgtgacaattaagtaaaacagatccatgcgtataaagagatattctatcgtaatcttgtttctattcgtctctttgtatataaaggcgacgggacagtcttgtgatgtcatttacatcaatggtgagcaatggtggctgatggccagaccaatagacaaggattccgccctatatacacggttaagggactttcttccggaaaatcattgtatgtcaaccgccaactgggatggttatacggccttttggaaaatagaggacagctgtctttacccgcaacgtatggaaatatgcgtatatgacaaggcaagtcggaaagattccactttgatttaccacacagacgctctgaaaacactttttgccccttattatgagaacggaaggattcctgcccgctggttcagcagtgaactacgggccggcaaaggtgatttggtacattatgtccactccggtttcgaccgtaatatggaagccgaacaggtaattctactcaggcaaggcaggatacaaagtgtacggacataccataatttcaaacaacctggaataaagattttagaatcacaagatgaaatcatccggcggttcccctggcatcgttttccgaagtacaaaggacagcggctgatattcagtatacgtaatatccaatgtaccccggatggccatctcctggactttgatgtccgaactttgttcatacgtcccaaaggagaaaacattgaagaccggaaccacccattagtgaaagctttcaaagagacactgaaaagtatttatccatgggagagactattcatcaacgggaaatataccatggaacctctaaactgcgtattaggtatttgggagaaaaatgatttaccatccaaagcagataacgatacaaccggatattccattataggtaaagtttatggggaagaagtgcgacagattccgccctatgatgttataaaaagaccgttgaccggttccaatctgagagtagagggattgccttttcaaggttggctgactgattctacaggaactttcagaataaaacatttaaaaaaaggacaatgtcttttgcgggcagaatttattggcttgaatccttgtgacacactcgtcaccgtgtccggaacaacatgcacggacaccttacaactggtattgacattgccttatgactatatcgaagaatatgtatgttcaccgaaattgtcacgtgaatatatcaataaagggcacccgaatctaaaactggtcatacccattgaacaagacaaaaaagtacgggaacatatcttttggaaaaagtatggagtcaaatattatagctattatcccctgaaagaaaacggaaagatggattgctatttaaacacgcccaatcgtctgttgacagcctacaaccgggaagtgttccgctatctggataaaaaatacgggaaaacatggcgcgaggaagtacctcccggcatcttcggactggataaatcattggatgagctacgggatgaaagctggcttatcaagacattgagccgacgatgtaaatacccgatagtctggcagaagaagaacaaaggctgtgtcttgcgagttgcttacgaagtgaatcaggatggttacatcaccacggccactattcttggtaaaacgccccgttcatttcgaaaatcagtactggatgttttacaatcatttagaaatgaacctactgtcttatgccctggaaaggatacgctatgcattcaatacagactggataccatgccactccttccgaaggcggatgtggttattaccggttattccacctgcgaccaacccgtcttgatgagatatgatgccaccttgattgcccatacccctgaacctcgtttggaagcgggtgttccggtctgttatctaaatgagcgtggagataccattgtgccatacggcagatataaattctgtcaaaccgataccatcaaaggtataggctttgtatacgaagacaagccaagagatgccaggatagtctgcattaacgatgcaggcaagaaacttttttatgtagtcgaatgtgataacggacctgattatgtcaaggaagggttgttccgaatcatggatgagaaaggcctgatgggttttgccgattcgtcgggacacataatcattactccccaattcaagtttgcatacccttttgagggaggaaaggctaaggttacatttacgggaaaacaaaaagtcgtatccgggtctgacggcgaaaaacattattgggatagtgaagaatggagatatataaacagaagatgtaagtttgtacaaccttaaagtcaaaacgtatgaaaaaaatagcgtacttgttatcagtttatttattctgcttgttacccaaattgcaagcgcaggatatcgattttccgctgtcactgtcggaaatagaaaagtatgagagccgcatccgcatacaaaggcttcccgctgtcaccatcacccatgcggacgcctacaaaatcaggacacgacaaccagtatattctcctcggacaaaagagattgtgcttgatataatcaatatggatggccctacagccgagcttgaatatcataatctcaaacagatggtaaatggcaaatggctcggtttcccctttatagacaatcttgtattcgccattggaggaagagatttatccaaaggcgatacgctacccgaacatatccgtatgtccgagtttaaatatccgttaaagcccaacaggtaccaggctaatttttatgtgtttgccaacatccatacctattgcaatctgacaggtaaaagtattgtttccataaaggagacggaaatggacggtgcctttgctttcaaggtattaccatccaataatgattccatacgtattttatttgaaaaccatacaaacctggaggtacaaccggtctttttccctagtataagtacagacgagcgatatatggtacatccctttgcccgttccggttgggtaggagaagcgaattatatgaaaagccgtgcccgtttgaaaggtggagaagcgatactgtttaccattcctgtctcatgggatgtcaaccggataacagacagaaacgacaagaaacgattccaagcaggcaggttactttcaggaaaataccgaataggactgcaactcgaaatttatatggatacggaatttgaagtaaaataaatacaaccgcttatgataacaagactattattattggcaatgctcctgccgctagccggcctgtcacaggtgcaggcgcaggcagacggacgctacattgaagtgaccgggacatccgagattgagatcgtgccggacaggattcactacattatcgaaatccgtgaatacttcgaggaggagtttgatggcaggtccaaaccggaggaatatcgtacaaagatctctttggaccggatcgaacagggactgcgggaagtgctgcatgacgcgggtatctctccgaatgccgtccgtacgcaggagatcggtgattattggcgtaagcaagggcaggactttctggtggccaagaccttcgatattacgttactggatttcaaacagattgatgaaatcctcaaacgtatggataccaaaggtatccataccatgcgcatcggtgaactggaaaacaaggacatgttgtcctaccatcaaaaaggaaaaatcgcggccttgaaagcggcgcagaggaaagcgtcctatctggtggaggcattgggtaaaaaattgggaccggtaatacgtattgtagaagacgaagcaggtagcagccttcctttctcacagagtaacgtgctgtcctccaatgtcgtttcatttgatagtttccgtacaattaaaaagaaatactctatgcttgtgcggtttgagattgcggattgaaaggaatcgtaactgcttgaatataagggataatgtcgtatactgccattgccttcaataacttggtatgaaattcgaggaggatcttgaatctaaattccaatgttctaccatatcggatattcataaataaacaagccaacctattctaccgcataaagtaataagttggcttgttctaaattaataacataaataaagccaaggcattattgtcatcattaacagcatcaataacaaaacataaagcaatatccgtagtgtatggttcgggcatttctttttgacaaaagccgataccatctttatgtgtaacaggaaatgaatggcaagcagagtgaccaatacaactcccgcccacaaatgaatattaccccaatcatgccttcccaagcccagtaaacgtgaacaccatggagtagcgtcctggaatcttacagcatggcgggaaggaatgactatttccaatatgaagccacttatacttaccaaagccattgccatcagcatgacaaagtctatgataatattaagtgacatcttattctttccggacatcattctttatggctatgtccatgacattcatgatgatgttcatgggatgaacagcccactcccgaatctgtaagtttcccgcttaaataatcagcggcaacttccagaatattacccgaacagcctcttatgactttgatatggtgggacgtaagtacattcaaggcaccttgccccatatttcctgccagcatgacgctgactcccatgttttccaattctcctgcgatattggatttacatccgcatccttgcggagaaggaatagtctcgctacttagaatctggttgttttgtcctactgtcaggattgtgtaatactcacaatgaccgaaatggttatcgactacattgtctctggtcggaatagcaattttcatcataatctcatttttattaatgttaatattacttgcgcttaagtcatcggagtggcataccggacattccatcttgcggattttaagcgtgggattgatattgttgaataagaaaccgcatgctccgcaacggaaccattcactgtctgtgtacgctgctccgccttctatcataatggtaacaccacgaaccaatgccttggcaatcttttgccttgcgctgacatatatccgacttagtgtcggacgtgatactcccattgaaacagacgcttcctgttgggttttcatttcataatcgcataaccgtatcgcctcatactcttcaaaatgcaagaatatggtattcttacaacaaccgttcagacctatgggcttgaatcctgcggcaacgggcatgtcattaactttacggatatttttgggacgtggtgacattatatatattgtttctgcttgcaaatataatgaacaaatgctcaaaataaaaacaatagttcctcttttttaaaccaaaattacttccgaaatgaagccacatgccgaacggcatataaatgaaagccgcctttctgtaaaatacagaattccgcctatgtccgcaggcagaatcctattccccggaagtattccctcttacaccaactcccgccagtcaaccccgccattgttccttttccccccttttttcaaaggtcgcgggttcccatcttcatccaggttctcttccagcagtttattcacggcttcctcattccctacctgggaaatgaaaagatcgaacagactggtattgcggatagcgaacagcgtccgtgcggcactgctccttttgtccgcatcctgatccgccccgttcaccctcatcagcacatccccgacaaggctgaactcctccagcgtaaccgcctgcgtaatcacttccgtttccggtaatgcgctgtccagttcttcctgctccttccgaaggagttccatctcctccagcggaagcagacattccacatcctcttcccggatttcctcatcctcaccgatatagtccgtcccctgttccagcggctgactcatatagggggccgccgtcttcccggcgttctcgtcaagatagacaaagcgtgtctttcccatcacttctttctcatccgccggctccggtgacatcgatatcatttgttctcttttcgccggcgtgtacagcaggtcacacagctcacgtacttttttcttttgttcccataccttatataacaggtaagcggcacagccgaccctcaccgacagatagacgagtccttccataccatcatttctttaaattttcgatgacacgtctcatcaatgatatcccggtacttctccatatgctccgccaacacattgttcacgaacgtgggtacagatattcccggcgcaatgacaggaaggatcccggtcaatgtctcatacaaggattcatcaatataggtttgtctcctggctccggtcattttccgggtcaggaacatttctctgtaagcactcgcattttccatgcctttcaataaatctttgttttccatatcttcttgcttgaattgtttcaaaaccggactggcttgcagaccggtcgtttcctctaccgaagtcccgatagcgtccgtttccggaatcccgctattggacaaggcttcaatcagggtttcccctaaattttccggaatatctatctttgcgaaatcaggaaagaaatccgcatcgtcagggtgttctttgaattctgccggaaatacggtttccatataagtcgtatcacggactgacttcctcatatccgtttgtatcggggggagagccccgcctttcctcaaccggttcctgcctgctttcattttaagtaccttgtacagcaaatatgttacaaacagcaggactggataaataaacagatgttccataatctaatgcgaattttgggtactcaagcgaaccatttcatccaattctttttcatacacttccaaatgatggtcaagcacgttgtccagaaaagcgggaacagtcatgccgtcactgagcaacggcagaatccgtgcaaacctacggtaggtgtcataacagatataagtctgctttcgatggacggcaatcttacggttgagaaaattttttcggtactcttgtatcttctccggaagtgagattccgcttccagccggctcgcgggaaacaggaagcggtttgtccgcatcttcccgtacggacgggaaaatatcagtttcccttgtggtcttttcttccgcaaaaggagtcttaggagtgccctcggcatccgtaccgttggccatgaactctttcaaccgttcctcattgacattgaatacgcccctttttttcatgtcttgtcggatttaagatggataatccgttcgatctccccggccagcacatccatattgctccctttcaacaacttttccgaaggtggaaagtaggtgcttctgaaaaatgtctgcccgccggaggaggtctctttgttataacgttccatgtccggcatgaccgtcgagagcgtcttcagaccgatcttctcaaaaatctcgttatagtgacggtaaacctccctggagacacgtccgtcaatcttgttccagaatagtaggatctcttttaacggtgcttcaggatattgccggatgaaatcccggagcgtcgccacgaaagacaggctgctctgcatgaccatccggtcctgcacgaccggcgtaaacacatagtccatgttgatgatggcctcaaggattcccggagtattcaccgttccgggcaaatcaaagaaaaggatatcactgttccccgataaccggtctgccgtttccagcactttgccgggcccggaggtaaggaccggataggctttcttccccgtccgttcatactgcctgcacaacaactgttggaggaactcgcttctctcgacgtttttcatgtcacgggaacgtagcgcctggatgctgaactggggatagtcgcaatctataaccgcgacattctttcccttcacgtagtggaaataactggcaagcagcaccgtcatggtggacttgcccacaccgcccttctggttgctcaaggcgatgaatgtgcatcgtttgctcataagctttcgaattgtgggttaataatcgttttaatgttctcgctatttcttcttttcaacggcttgtcgggttcatgggacatggcacggtacggatggcatattccggccttgttatcactacagaataacctcctcataagatatgaggggcttgtctccctaccggatgatggcacaatattaccgtcatacttgaaaaacggaagattgtcatatcggtacaggctgtcatgcctgtaccctcccggcatcttgtcaccaaatggccgtatcattgtattttctcttttcatggttatcattccgtttttttctcttgacacaataacataatattttaaaaacatgacgtggacagaggatgatctgccggtaacacgggtatattttatcagcacatcggaagattgtttccctgtcacagtccaaaagtaacggctatttccaagacttccgccaatattgcctcgctctgacatcagatgtcgtcagatgtcatcaaatgtcatacttatccctgttttacagcttgttgcgttcttctatttttgcaaagtcagaatcacgcaatggaggaagaaggacttcacggaccacggtatgccgcaagcgtcgcgcagcaatccgaccataggaggattctctgttcaagcgaacagagcaagttgtgtccttgtccgacaaaaagtcttttgtcagacaagaaccaacttgcccgcccccccgggcgggggaatccgctccaaagtcgcggattctggaagagaaaaaagtacaaaccaaaaatctcatgtgtatggagagaacaacagggacaaggacgggcagaaagcccaaaagtgatccggcggaccacaagtacagtttccgcctgaacgccgaggagaatacaaaattcgagaagttactggcggattcgggagccggcaacctcacgctgttcatcaagaaatctatcttctcgggacagataaaggtcgtgaaaatagacaaggcgacaatggactattacatcaggctgacagaattccacaaacagttccaggctgtcggcaacaactacaaccaggtggtacgtgccttgaagaacaatttcggggagaaacgggcgagggcattgctctataagttggaaagattgagtcttgagctgatgctcatctgtaaaaaggtcatggcgctaacccaggaatacgagcggaaatggttgcaaaaataagccatggcatgagtctttacggagcacttgcttataactatgagaaggtagcggctggtacggctgagatcctttccggtaaccgtatgatttccgaccggctcggattgccaagcgaggacatacgcctggcattgctctcttttgagaattacctgctggcaaaccgcaatacggagaagcccgtcctgcacatttccctctccccggcaccggaagaccggctgaccgacgggcggctggcagaactggcggaacgttatatgcagaagatggggtatgggaaccagccttacatcacctacaaacatgccgatacccacaatacccatatccatattgtcagtgtctgtgtgaatgaacaggggaaaaagatcagcgatgcctacgagtatcggcgttccatgaccgcctgtcgggaactggaagtggatttcggtctgcgaaacggagcggatgcggaaaggcggaatccaaaagcggaactaagaaaggtggacgcttccttgggagatgtccgccatcagataggcaatacccttaaagccgtattggaaagctaccgtttccaaaccttcggggaatacaatgcgctgctttccacgctcaacatcgaggcgaaacaggtcaggggagaatacaacggtacaccatatactggtattgtctattcggtcacggatgataccggcaaggttgtcagcccaccgttcaagagttcccgatttgggaaacgcttcggaaatgaacagttggaaaagcggatgctgatgaatctgaaagctctcaaagacgggaaatgggccccttccatacaggcggacatcgttcgtgccttgcggcaggcggattcacggaaacggtttgtggaactgctcgggcaaaggcgtattgatgtggttttccgcgagaatgagcgggaacgtatctatggtgtcaccttcattgaccacaaccatcgggaggtattcaacggctcacgcatgggcaaggagttttccgccaatgtgttcaacgactatttcaaatggctggaaaacatacccgaaaaggaacggggtggacattccgctacaaagctttggcagcatcaccgtcacgaatcctctagcacgctcgaactggcggcaggcattctctccttggaaaccaatccgcaggattacgaggaggaagcctttgcacgccgcatgaagaaaaaaaagaagaccggacgcaagcgtggcatttagacaaaacaagtatcaacccatttatatacaattcttatgcagcaggaagatgatttgagggcacttgccaagattatggaattcggcagggccgtgagtatttttcttttggtggtacacgtctatgtgtactgctatccgagtatcaccgcatggcacttgaaccttgaggtaatagaccggattctggtaaacttcaacaacacgactggaattttcaactgtattctctggagcaaactgttggcagtgcttctgctggccgtttcctgtctgggtacgcacggagtcaaaggtgaaaagataacctggcctaaaatttatgcggcgttggtggcaggatgcgcattgttttttctgaactggtggcttcttgaactgccattgccacacatggcaaataccgcattctatatttttactcttacggcaggctatctcgccctgttgatgtcggggttatggatgagtcgcatttacaggcacaacctcatggaagatgtgttcaatatggaaaatgaaagtttcatgcaggaaacccgactgatggagaatgaatattcggtaaacctcccgacgagattctattataaaaaacgctggaataacggatttgtcaatattgtcaatattttccgtgcctgcatggttatcgggacaccgggcagcggcaaatcctatgcgatagtcaacagttacatacgccagcttatagccaaaggctttgcgatttacatctacgattacaagtttgatgacctgtccaccatcgcctataattctttgttgaagaatatggacaagtacgagatcaagccccggttctatgtcatcaattttgacgatccgcgcaggtctcaccggtgcaatcccatcaatccggaattcatgacggacatttccgatgcgtacgaggcgagctatacgataatgctcaacctcaatcgcacctggatcgaaaaacagggggacttcttcgtggagtcccctattattctgcttgcggcaataatctggtatttaaagatttacaagagcggtatttactgtacgtttccccatgcggtggaactgctcaacaaaccctactcagacctgttcaccatcctgacctcttatccggagctggaaaactacctttcccccttcatggacgcatggaagggaaatgcccaagaccagctccaaggccagatagcctcggctaaaataccccttacgcgcatgatctccccacaactctactgggtgatgaccggtaatgatttttcattggatatcaacaatccgaaagagcccaaactgctctgcgtgggcaacaatccggacaggcagaacatttattcggcagcgctcggattatataattcccgtatcgtcaagcttatcaacaagaaaaaacagcttaaatgcgccgttatcattgacgagcttcccaccatctatttccgtgggcttgacaacctgatcgcgacggcgagaagcaacaaggtgggcgtgcttctgggttttcaggatttcagtcaattgacacgtgactacggagaaaaagaatccaaggtcatccagaacacggtggggaatattttcagcggacaggtggtcggtgaaaccgcaaaaacgctttcagagcgcttcggcaaggtgcttcagcaacgtcagtccgtatccatcaaccgtcaggacgtatccacctccatcaacacacagctagactcgctcattcccgcatcaaagatcgccaacctctcacaaggcacgtttgtcggggctgtggcggataattttgatgagaggatagagcaaaaaatatttcatgccgaaattgtcgtggaccataccaagatcagcgcggaagaaaaggcttatcagaaaatcccggtcatcaacgacttcaaggacaggaacggtaacgacatcatgatgcaacagatacaacgcaattacgaccagatcaaggcggatgcgcaggctattatcaatgaggagatgcggcgtatcaaaaatgaccctgaactccgtaaacgactaggtctggaagatgaaaaaggaaaggaccccgacaaatcatgacaagtggaggggtaattgaagaaattataccccgactgatcggattattgaaaaagatgccgtatatttgaaacttgaaatagagaaataaggcaggtctcgacaattgggaccgccattattatacataagtcgcaagacgtctcgaacaggaatctgacaaattcaaaaacacagaggctattgcgtgaggcttatgctataccttatagcatgagcccatgcgggtttctgtgttgggctttgtcagagcctctgttcgaaataagcatgggtttcatgcttttttaacaagaggtatggcaaaaattcaagttatcatggcactcactttggacgggttccttccgcatgaagacgagatgcttatgcgatgggtgagggaaaacaaacggtatggtttcccacgctggcagcgacaggccacattccacatctacccccattacggtttgatggacttgctgaatgtaaaggaaaagcatgacaaggattgtatttatctggcaggagtgggagatggaggaagtgcggaatatgccgatggactttttcggtataatctggtggatgagacagtactttttctgctgcctctttcttatggtggtggaatccccttgacgggagaattccggtctgcccgctggaaacttcttggctgcaaaactttctccaacggaatctgccggcttatgtataaacgaaacggatgaagatgctatctcaacccatacctttccattttcttgtatagcgtcggacggctcatccccaacattctcgccacacgactgatcttacctccacattcttccagaattttccttattagttctttctcttctgcttcttccatcaagccttttttacatttttcgcctgtcctacagatggtcgcattaagattcagatctttatgggttaacaatggagataccgccaacaggacagcacgtcttatccggttgtcaagttcacgcacattgcccggccatgagtgggaaagcatggagattttggcttgttcggtaaaaccggaggtctccacgcgtatctcttctgaatgttgctcacgaaagaagtcagccagtggcaatatatcttccgggcattcggagagagagggctggcgtatctcaaactcggcgagacggtagtacagatcctcccggaaacgtccctcccgtatggcacgctccatatcctcgttggtagccgacaatatccgtacatcggcttcaagttctttgcggctgcccactggacaatacactctttcctgcaataccctgagcagcagtgtctgcatttctggaggcatgtttccgatctcgtcaaggaagagcgtaccgcccttggccgtctcaaaatacccggcagtatcctttttcgcatcggtaaacgccccctgcacgtggccgaagaactcagatgcggcaagttccccccggatacaaccacagttcaccgccacaaaaggcttgtccttacgtccgctatgctgtagaatcagctgtgcgacagattctttcccgctaccattcggtccaaggatcatgacggaacaattcaaaggagccacacgacaagctatccgttcggtctcccggatcgccccgctaagccttttcattaatgatttcttcgggggaacggaaactggcagaccgatcaatccccgtaacagttccatcagcaactcctcgtggacaggcttgggcaagtagtctttcgcgcccaatttgacggcacgcaccgcatctgcaatggaggcatgttcggtcatcaccacaaaaggaatatgtaatccttgggagatgctccattccagtaagctgatgccatccccttcgggaaggcggacatccgtcagtaccagcgccacgttattccccttgattttccggcgtgccgaaggctcatctatggccgtcaataccccgtaaccggctttctgtagccatctctcaagaatatcgcaaagaatcaggttgtcctccacgatcaataaagtctttttcatccccatcatttttctttcttaattcattatttacttcgtctatcagtaaccgtatctgtttcataattctcatcgtgtactctctgaccgtctcgtcgctcgagatcctgtcatgcaggagcatccgataaccggacagcacatcgttggcccctaacaactcccagaccggagccatccggtgtacgatcctccgcatggcttcccggtcggtttttctcaaagcctcctccagttcggcaagatccttttccgactcttttgcgacaagaccgaacatatgacgacggtcgtccgtactttccatcagacgggaatagtcgaacggagacatgccggcgcttctgccctccgtaacggaggagataaaggccagcagtccttttgaagagaaaggcttgtgtatgcaaccgcaaaaaccggacttcatatacacgcccgagtccccgtccccccgtgccgtcatgacagcgaccggaacggtacgggaatttccgatatccgagttacgcagtaatctcaacaagccgaagccatcggtcacgggcatctgtatatctgtcaataccaaatcataatccaagctgtcgagtgctagaatggcttcttttgcattttgacaggtcgtgcattccaccccgttgcgcccgagcatgtcttccgttattttcagaaggatgctgtcatcatccactaccagtacatgtttgggaagtatcgtcgcagattgtaccgaaagctcctctgtttccggttcttctgtcgtttccgaaaggggaaacgacaggcggaatgttgtacctttacctggtcggctctctacttcaatgcttccgtccagtacctttacaagagctttcgtgataaaaagcccaagaccgaaaccttccgagtttatctcctgcgccgcacgctcgaacggacggaagacacgttccaatgtctcctcgtccataccgataccggtatcaccgacctccacatataatcttcccgccatgtacttggtatggaaacggatcgtacccgacagggtgaacttgatggcgtttgtcagcagattgtccaatatttgttccaatttgtctgcgtctcctctcactgtaatatcgccgacattcttatgccggtgctcgaacagcaaggctcgggcacccgctttgcgggcatattccttcgatatgttgtcaagccagttgtttagacggaaaggaacctcgttacgggtatccttggtctcattgatcttataaacatccatcaggttgttcaccaggttcagtatatggcggcaggaatggcggatgttctccagatagccttcccgttttttcttttcacgggtttccgaggccagctccacgcagttgctgatattgcccaatggtccccgtatatcgtgcgagatagtcaggatgatctgtttacgcataccgagcagttcctcgttctcacggtttatcctttggagctgtgcccgtccttccctttctttcctgatatcatgccgtatgatcaggaacgagatgaatagcaaggaggaagcggagacgattaccagggcaaacagcttgaaagaaaaatctccggcttccgtgactttttcctcacgactgatgaacgccgcctgcgcttgcccgtcaagatgggtgatgagtatttgcaacttccggttcaaggccttattctgtgtgcgcagactgtcggtataaatgtctatccggcgttcacgttcctcttgcatggcaatcaacttgtcattcaaatcttgcagtcctttcgatagctcgaagacctgtacgctcctttttccaccgaaccaaccggcaatcccttttttcttttgagtgactgtccgggtacgaaccgcttccctgataacaacaggcagacgatttgcgagcagactgtccgcttccccctgtctggtaatggtctccataatgcggagcaggtgtacctccttggcttccaataaatggcatagggagtctatctgctttggcaggacgaacgtgccacaactcactttcaatatttgtaacaagctgtccgtttgcaagcgttttctgcgatactcacgaaaatcggtatcctcccagactatgacggactctccataggtggcaagctccgtgatatagcgatgcgccgtactgatgtcatggcgtatcctgcgtatctccgatgtttccgtttttatctcacgcatgcggctccgttcgtataacaagatggaaaccatgccgcaaacagccatgatcaatatcatataccctaaaagaaccttatgctgtaatgaagctttccttgctaccataaatagatttttattttttttaaatacgcaaatagattttatcagtttttaatattaacaagatcattcgtcacaaaaaataaaggcaacgtctactttcccaagcaggccgttgcctcgtaaattccctatcttttgatagagaatttacttatgacctgattttacgtgtacataaaagttcagatcatgtatagggtcattcttcatctcttaaagcctctcaattttttcgcttggaaatatatcaattactatcatcactcttatccaagggtaaataaacatcaccatcccaattgggattgacggttacctgaagtacgtactccattgttgtcaatttttcataatcgccaagtatcttatagtactgattccgcttaaaacagatttgaaacgggttcttgcccgagtccggattttcgggatccactggtgtctcctcacctcccgggataatcccggtcccattcccggcatcacccgggatggagcgtaattgagcgtttgcactgcttcctgtacctccattctcgtctgtgtcaacatcgccatcttcctttttctctcttacttgtaaacggcaaacgacttgttcgtcttttccatccttgtctatcgttatgcgcaaactaagggaggtgcataccgccaatagattcgagcctattatttgtatattattattcttcacatccgcgatattcctttcccatgaaccgattacaaaatgttcaaaacgtccattccttttcatatcataagccgaacggaaatcatcgtacagccgtgcctttacccgggtattaacggaatcagcaagcagatcaattcgtttgacttcaggcgctacattctctaagttcagttctatcccggcaacccctcgatacaaccaaccggtcaatttctttgggttcttgctatcataacgaaagacggtatccgtatcctgataaacgacattaccaaaaaacagttccggggttttatattcatctttgtctagcaacgttatttccgcatgattaaaataggagtcgttcaactcaaacaatcgcttttctccttgttcttccgaataagccacggctgtcattctgtattcatactcactctccaagggaatttttcctgtcgccgtgaaacgaggttgtccatcagcgcctgcattcccggtccgatgggcaggtaataccaactcattggctcttaaaaagccctccctgtcagtctcgtatgtttggtcggccggacgctgataaatatatacttttactcgatccacgtaaatcgggcgggtattggtttcaccggggttccccggccctaccggattcgttcgggtggtcagttcgttaccactggaagtaaagttaaactccaccggcacctcaacggttctcttttcctcctcccccggttgttcttccgaatcgcaacctgtacttaacaagcctaaacataaaagacttatcatatataatatccgcttcatcgtatcttaattttactggttcaaaatacctttacaacagcactggttccatcccgcaaatagacctttaccacataagcccctttagcgatcggcagacggtattcggctgactccgattgtacccggccggacatccttccatcgatcgtaaaaacatcacaacgccgcataagcccctcggtcgaacgcacaataacctgaccgccgctttcatcccgataacagaatacttttggttgtgtcgcggcaattactccgttacttgtcgcgatcgattctcctttcaaacaaaaacgccctatgttggttgtcagccgtcccagctcaatcttattttcttttccggcaagcaagggatgaatccggttgttgtccaaatctttcaagatccaaccggaatagctctcgggaatcgttatcgacaagttgacatccgctggcttggctaaatatataccgagaggtatctctccgccattcgcacgttgctgaatatccagcgcacgttgctctgctatggtaaacaaggcgattgtcgggtttatctcattttccaacaggacttccgcgtcctcgttctcccggtaatgatcattcgctttttgggaaaaatacaccaaagcgccggattggcagttatcggctgatgccatcaagcgtaccgaccggcttgccacggaagcgctttgtttcctcgacaaccgatttgcctgttgcagttccggttgtgtctctaacatgtcttcagtaaaggtaatggtacacgactccaccatccgctctttgcaagtcacaaaaaaagactgcgtcggggcgatagcccgtaaaccatcaccatcattacccggccttgcttccaagataccatcaccatccaagctatgaatcagcgagttggctgttccattttttccatcatatattttaacggaagcaatatgctcattccgctccaagaatttctttacatcgatatgagtcatgaacggattgccgaccaagaacgtattgttattaaaagagccattcttaaatcgcatgacaaccgggaaggtggctttcccgtcttcctgctcatagataaaacgtccggaattattcctgtcatttatccgcacgcctacgcttaattgagttcccttctcatcataataatgatattccgtatgctccttcgggaaacggaaagtatacgtttggccgttatcaccttcttccttctcggatggcttcaacggatgtacccacaccgacaaggcattgaaatcaaattcttgcccatccaacgtattcttgtcatagggtgtagccagccaattgaaaggtttagtccagccggtcacggctatatctactttatctcccggttttacaaacgggcgattgcttgaattgatcaactgctccatgtaagccgcatcccagatacgttgataaatagtaggcgtgacccggttttctggatagttattcgcagtcaacgaggtgaatgtgtccggcagttgtattccattggcagcgacaaaccagtctcccgaatagattcttttcaacggagctgccaccatataatatcggttgggagacagttcaatatccacccatgcctttttataatccagatgatgtgtgtttttcacctcagcgttcggttcaaaatgaatatagttacagccgtttgacgcatccgcttccagaatcggataagcttgtgcggattcaggaataatcacattggtacatgtccaaggcgagcccttcgaccaattttcccaggcattccagtcagtgccagtcacattttctaaccaagttgtttcaagcggatggacagtaaagtacaattcagacaatacgaactctgcattttcatcatccttgtcataaatgattagtttatactctccggcctctgttgcctcccatatttcttgttggaaaatccctttatggatggtaaaagttttagaaaataccggttctgccgtatgaatattatccgctttcttaaagatggacatcttatagtccttttcctcttcttcctcaaatttcgcttgcccatacagcacgaccttttccccttcgcaaatatgcggagtcgttcgcaaattcgccaaaccacccgcgcaactttccggatccatacaatcaggcagcccgtcgccatctatgtcgctacggaaaaagagaccgtacagattatacccttccaatgcgcttacaacggccgcaaaagcaatacgtacctcatcataaggcaatgtcggttgcgagataagatatcgcctgtcaccatagcctatcacgtccaacccgacagtattccagtccgagaacttctccccggtctcttggccgttcagataagtcgaaaccgttatccaggaaccgacaccggctccaagcacaaacgtcttgctatccaaggcaagccccagttgctgggtcttatccatggtacgtcctaatttcacgcataagacaagacctgtccctacaccaacggcaggcgtataggtcaacgcagtattcatatcaccatccaacaaaagatcaccattgaccaatgtcccggcaacggaaacagtttgaaacggtatttgtaaagacagggaagcattcgtctcctccgtagaaacggccagggcacaaccattctttagcgggtccgaacaatcatcatcggccgattccataaagccataataaatacgcaacgtgttcaaacccaaattcaacacgccggaagtccacaattggaattcatcaaaatccacactcgcaggaacctttacgctataccgtatcttttgagattgctcgctgcctatcaagccaaccccgaccacgttggactcgtcgattacattctcatacacgacctcgccattcctgaatagccgtattcgcaagaactgcaagacatcggcatccaaaaaagtagaggcattctctacgataaaaccgacacgtttatcaccctcaattcctaaatcgaacgattctccacctaccgtctttatacctatgatacccaagttgcttgccacgctcaaaccactcacataggatgcgtaattatcaaaattcccatccaatatattggtcttatccttgatatcgctaatactgatcaggcctccggttacaccatacgtacttgtcgaaagctcatatttctcatttccatccgcgttaaaaacaggggttccacaagacgaactaggcggacggactccttttgtcaaagtgacagtttccgaacatgggggttcagcggtacaatctaccaccgtagccttgaatgtgtacacgccctcgacggttaatcccgttactttggtaacgccatttgccgtttctccgatctgaacgttattcatcacctcttgaggatcgcgcggatcttctcctgagaaaaactcaaaattcgtcaattcccacttcaccttcacatccgggttgctcctcaattcgtaagtcgttacgttatcgcaaaccgtagcgctcagactgggctggatcgggcagtgatggtctatttccggtttctccctgacaaaaccataatagatacccaccccgcctaggttcacacttaacgcaccggctccaacagtcagccgggcagaataaaaaggaaccttggatgtgatggctgatgtgatctctcccgtagtgacaactcctaacttcaatatgccggccgataaagtttccgtttgaacctctttgttgttcttatcatataatgtaatggtcacaaaacttccgagtgacaaatccaggagtcctttattaaaatatttaaaccccacttccgtaccggcaggaaactcgtaagttgtaccaatctgcgcatgaaaccattctccaatagccaaccctcctgtccccaaatagttggttgtatctgaatcgaacagtttgtcatgaaaagtatcctcccttaggggtttgtcttttaccggccaaggcatgccgtcgcacttgtcatagtcgatttgtatgcctttttcacctaactctaattctatcccgtatgtttctactccatcataagtcaaaagcacttctttcggatccccgacaaacgcatacctgatgcttagctgattaatagcctctacatgtaagcctccttgcatcaaataaatctcatcaaagtctttcgtcgtttttacacagacatctacagagacagcatcagaacccggaatctttatcaagtccaaaccgaccccaccggaagacgctcctcccaccgctatgttctcctgttttttgccatttaaataagtcgtaatagaaaacaactggatcacctccagcgacaaaagtcctccactctcagtcgacgccaagctgaaaccggcagtcgttccccccttgtatgtgtttttcgtatccttaacactcaaaacaggcgatagcagcgcatcgaccttaataccggttatcgaagcatagttgttcaagtccgaatcggttatatactccaaatgactatagttggtcgccacattggctactgacgagatttggttcaccatgcaataagggcctaccaacgccctacgcttggtaacctcaaccggttgatttccggtttgcccttgtatattcacaaacgataccaacaggaaaagcaggaaaacacctctttttatatatcgactaatcgtgcgcatagactttttattatttacttatttcccatatctctttaatctccaacacatcgctattggatatatccggataagttattgccaaagacatctcttgcagcgaaccggaatagtcttttatcttgccttcagacaaaaattggttaatagtggcaatcagttccgcatcttctaccttaaaaggcaatgccttttccaaatcacagacgattgttgtcattttagcttgcttctcccaatcggttttcaaattcagttcgttcatcgggcgatagaacacggaatatttctcattcactccctgtccggtcgaaatagacgagttaagggtaagcgagaagtccggagtcgtagcatcagccgtaggataccaactgaccccggaaatcttattcttttccggatccgccaatccgacccaattgaaagcaagataagaaacgctcttccgcatcacggtcgtatccgctttcatacgcaggctttcttccagacctgcctccggagcctttcctgacaaataatatttatccactccggatcgtccctcgtaagcaatcgttgcccatgtttccaattttcttcttgcagattgctcaaacagcctacggacggttgtattatgttcaagttcattcaacagcgtattaaccaaatgggtttggaagtttgataaaacaccgccttccgccatgtccgaattgatttgatctaaaaagtcggatttgccttcgccctgaatttgcccttctattttagataaacactcaatatattttgtgtatttatctttcaaatccggattcagaatctgttcggaaaaataccgcttcaaagcatccaaaaagtcaaccgtctcatcaaccaccggctggcttaactcatctttatatttccgcaagacaaaagcatagaaatccgattgaaaatagttctttatatcttccggtaacaagcaggtagccggataaccggatatttccgtatcccccccctctgtcttttcttcccaatcaggaagtttctcaaaccagaagtcggtacgggtcaccgcacgccgcaacacgaccggacaattgtaaggattctcccgatcggcaccttgatccgtcgacaagatgtcccgcgtgaaaacataaaacatattccggtcattgaacggctggaagggcatttgcaaataaaccgtctcgtacgtcccggtctctcgcaggggagaccacggctgaccgtccgcacctgtccacccgcaaacggcggaatcgatattggccacaaagaccgcatgataggtctcaccctgcgacaaggtgtctttcaaagcctcccgttgctcccacgacatattctcgcgtctcaacggccaactctccccgtcggtatccaacccggggatttccctccgcttctccaacgtcccctcctcactatacagcaggtaagtaagcgagttgatacgtacccctttcggctggttttcatggatcacacgcgtggcggcaccagccgcggccgtgtaatccaccacgaacttaccagccgaaaccaccgatgccgtaggctccggtatctcattttcgcatccggcacaaaggcataagccggctaacaaccccacaacctttttcatatatacgattccattcattattcacattcatactccatcccatgcgtcatcgtcgacatccaccgtcgcatcgtttccatcggcaaaaccggcgtaacgcacctcgaacgtttctttatccttaccgttaaacaagacaatcgtccgtgtattcttcttgatttcgatagcatccatcggtacatcttcttcggcacgtccacgcaagacgtattctaccgaggtaccatccgcaaaagagaccgtcaccttggcgtctgacagttcccccggaagcagggcgatcggtaagagctgttcttccaactgtccttccgcgcttacggtccaatgaaatttccgctgttcacgctcgataacaagcaccgagtcacacgactcgtcgcggatatagcaattccgggccgttttcatgctgaccgtaatatccgtcaccgccctattcgttgccgtatcgaactggtcggccggctttcccatattcaggacgagttgcccggtgacgcgtctcatcagcactctttcgttggtcggcatgtcggtatcgacccagcggtcgatgattttacggtaaatcgccaagtcttccttgctcgcctcattcaatgcggcttgatagtccaataccggtcggtagtcgatcgcgaaatcgtaaaggtccttatatgtcaaaaacgtattttgagccggaaacatcccgcttcccatcccttggcttatatccggcacgcacacgaaagcaaacttatgccaaactccgggcaaattctcgacatgataggtttgtccctccaggtcataatatttgtcgcaatacaagaccacattataccgatcccaatattgatccgaaggaccggtagcctcgggtttcccgctttccggcctgcgttccgccacatagagccgtacaaactgctgatccgttatctccctctcggcggtattgtccgcggcgcgtgtagccacatggaatgaggcgaccgccgtttgcccttcttgcggaacctcattcgagcatccggcaaggcaaaccaccgcccaggcgcatatatattttcctatcgtcttattcatcgcgtctaatcctttttttccactattttttatccatgatctcttcctcgtcctcattccagtcctcgtccgtatcgatctcgccgtctaccgttcccgtatcgggccctcgccaaccgttatagcggcgggcgcaaatcacgttgtagaaacgcgagcgcatctcgaccctcgccttgccgttcttttgcggattgggcgaaaactgcacggcccaactgaacccggcagtaattccagccgcatcgctagacgagggcgtggaggaaaagaaggaataaggttccatcttccagtctacatccacagtacgtgagtattccccgggataagacctcgaccctccgctgatatgcccggctatcgcctgcaattcggtgtaagccggcaaataccacaaaatctcgttatagtcgatcttcccgttgccgttacggtcgcggttcttgcccaaggcatatcccaacgcgatgttcgatggaatattgccgtccggataagccggatcgatgccccatttgtcgccgttcaaagcgatgtcatacaacacacgggtattggtcaacccattctttttcgagtttaggtcgtctgccaggatctcatccatcttcagacaccaataatgctggaatccccattgcatatttttcttttccaagatacgttccacgtagagcgtatccagtaccttcttcgcgagatccgtggcaaacctctcgcgtatcaccatctgggccgcgtactgcttgatctctacctctttcacgtttcccgcctggttcgagaacaggagcttgcctgtacggggggctttgaagtaacgatcgttaccgtgcggatccttgattggcgggatatactcgtccgtatggatatagaagtagtgcaaccccgcctctccgtccagacggaaagcggcttgatcgcggctagcctccgctcccagcttacggggcttataggatggcgaggcggaaacctccagccagggggtctggtccggatcggccacccgcaccgtccagttactgggcgagtagagaagtacctgcgtcacgttgggatgggcatccagcacgtcctcgaagttcccgtagatagtcagcccgccgatcggattggcatccacgcgggtgtcggtcttgtctgcgtcgaagatacggatccggtagttatagacatggttacggcagacgttgaagtctttgtaattgtccgaaccgaggtagatatagtaggtcacgttgctcggatcctcgccccccaccggattcttcttggtgtagacaccgcggatcatcaggtaggtggcatactcgaagcctcgctcttccgcattgaccgtatacctaccgtcatttatgccttcgtctcttttgaatatcttttcggcatcatccgaattccggcttgtcccggcaagcccccgcttgttgatttgctgataatagcgatacaaatcctcataaccatactttccggcagtctcgggttcttttccgatcaatcctttcaagttctcccagttcttctcatggtcgtacacccttccttgccggttctcgaacatcttgaaagaggcagtataggtatcattcgttccaaccgctccttttacgatctcgaagtccaatctttttccctcttggtaaaattgtgccgaacggtctgtctcggcagcattaccggccacgacatacgaataatcgcctgcgcaaatatccagcgaatccgacaacgcgtcgttgggatgacgatatccccaactacccgcgtcgtcgaccgacccgccgccatccagcagcatgctgcccatcgggatattgtaaaggaacatttccccgaccgcgaatttatcttccggatcgtacggttcgaaagagacattaaaattgacttgcgccgtcagacgtttaaccgggatggtgtattcctttttcaactggtcggtcgcggtcagttccaacgggagggagccggtcatgatgtgtttgccgccataagctccttccggagttcggatcgtggtatatttcgccttcaacccagtcaaagtgaccggagagttgttaatcaaatcttccgtctcgtctccttccggcaaattgcacagggcatagatggattgatccgccacggcggtcaggtagatattgaccgaatggttatcgaccgtcaattgctggtaagctttattgaccaatttcccatctttgtcaaacaccatgaccaacacattctccaaagactcctgctgcccggcctcaccggcccgggtaacgatcaccggcgcctcctcggtagaaaagcggaaagtgatcatcccttccgttaccccctcgcccgggtttgagccgcccttgtcgaagtcgtcttcgcaaccggacaacaaggcgatcagcatgatccatatccaagtatatcgtttcatattactatagttttatttattgcgcgtaacaggcttgacgggcgtaatacgcatttcccttattttctctataataaccatcatcaacattgcctgaacggtcaatctttgtcgctaatgcgtttttataataaccggcagaattagaactccaataaaattttccacgctctatattcgcatccgcattatccttatattgcttcaagaaacatctcaatgcgactatcgatggcaagaaccaaaaaggatcttcagacttcgcttcttcataatctatctcaagttcttttcccgcttctcccagtgcacaaacctgtatggcagagcctttaaaatcatctatccatgttttatttataaattcccgataattggccttaccatctgtccaatgctctgtcacaacaagagatctccaatatccccatccgagtgtctgtccggcagccacgatatcccctgtaaccgcgtttcgtttcgtcccaaaatcgaaacgactgaagccacgatatccgtcactatcatcttccattttcacaatcaacgcattgtattgctccacgtacaaatcagaggaggcaccgcccaccacagaaccgttttcatcaagggcctccagttgtaatcggatcgtccgtgtctctcgcttattttcccaatccgggacactcgcgtaatcagccatccgaatgtaaatatcctttcctccagtaccagtcaattcagtgacataatctcttgtcgtttcgtcccaaaaccgaatccaaggcgtattcgaagcatcatcgaccggtaccgctgtcagtttccaattctcataaagaatcgatgcgcttatctccaaatggttcgttcgcgaaccgatgcagtcgaaaatataatatttctcgccggcctcttccggctcaaccttatacttattgccatccttgtcccgcagagacatcaagggaacaataggcacactgggaaattccaccggaatatccacttcctgccaaggtccggcctccacggtcaccttggttcccgccaggctttccggatagtcgccttccttattatccccttccagcttatgcccgatatggtaaatcatattcggatgcagggagtagatctccggggtactctccttgccttcgtaaatggcagggaaagatttgatccgggtcaattcgcttcccgcaacaatctgatcatcactactcggcgtatcatcatatttgtacccccacagttctacgttcagcgtggcatcgggggtattattttgaatgggcagtgcgtacgcccccatcaagatggtattctccagttgtttccgtccttccagatgaccggtcggtatactgtacaaaagatcaccgcttccggtttgctccggtcgcggtttgaaactcatcagatcgaacttacaaagcgtttggcaaaccggtttcccgtcaaccggtccaccgaaatcctgtagggacggcttgccctcccgcgtcatctcccgtgtcaggccgatccgcgcgttttgctcctgaaagaggttcaggcgtacctctgttacccgatagggggtattacccatattcagtttataagggatgtccgagaggtagcaaagcactccggccacgcggcggcgcagttccacctccacgacattcaaattgtcgggcatgaagtcgaacgcccgccaaccggcgaaaagctccgaatgcgctatgtcgggatggccgtaagcgattaattctttatcttgttttttgtcagtcgcggcggttgtcgggtcttcctcataaggcataggttcgcctggggcttctttcgcgagaaccgcttgtgccgccgacagtttggctccgggtttggcaaactccggctgtttattggcggcgtcatcaccataggtcaggccatacgtatcgcccgaggcgtcgtctaagccgacacataatatcatatatttgccggggaccatggcgatctggtcttgcggcaacagaagttcaaacgtttcggtttgcggctgtccttgcccatagtccttctctttcgagggatcccaaggggtgccgtttttcatcagtagctgggaagctacgaccttggttttttccgggtcaatatcgtccgcggtcatatcaccgcaataataaaggatggcgtagattcgagtcacgtgatgcaagctagcctggctgtacaggtgtgtcttggtatccaactgcccggtagtcaacctaacgacgatacccttctcgggaagaccctccggagaatctatcggttcgtcagcgcaacccgcgaagagacaggccaggaatatcaggattaagatgctcacatgtttcatcatatcagaaacctttcttaaattactcgttcttgttttgtataaatagacattataaccggcccgtgtgcttccttacatataaaaaagggggcttgccggggtgcttatagtttcctgcctaggaaactgaatagaggagccgtgccttgtcggcacagctcccgtataaaagtgattgtcccttatcaatcgggaagtccgatgcgggcggacattagtcgatctccaggtcgtggatgaattcccactggtcgttgatcttgattaccaactcttgggatttatccagcggctgtggtttatccgggtcaacgcctggtttgtcgggatcgtcgccaccgccacgcttaccgatttggtacaggtggttacggtagatgctgtaatgatattccgtatctttcagggtagcgtcgatagaggcgtcatccaacttaacagaccaggtctgaaggatgtattctttgtcattatcgtcagtagcgaagcctttgccttgatcatttcctttcttcttaccgaccaactgaagctcgaaagtattcaaggtctcatccttgtcgaacgggatgacgaattcgccggccaatacggcgccatcggctacggttacggcggcgttggtaccctcatacgggttcttccatttggaggtctcaccgaggtacttcttaccatcaacatccatcgcaacacctgtccagtctccatcattgccaaagctgaaccacttcgtcaagtcgatctcataaacggtgtaggcgttattattggtcgaacctttgaatgctgcgtcattcttcacaacatcgcttttgaaaccattgacaatattctccttgcctacctcggtagcgtcgtcgttctgcttgttcagctggatggtcatatccagacggtcgttacgattggaagcgaccaaacgcaatttggtagaccaacattctgttgtaccatcagataaatcatttccttccgccgggatattcgagaagtaacccagcacaccggcaacctgacgcttcagcaacacggtccaagagacactttccttcggttctaatgtcaccggtttggattgaccggagaatacctcgccgacagccctgctggcgaatttcgtatctttattatactcaacaggctttgttaacaggtaagggaagccggaacccggagtggtggcgaagttgtgggtgatgttttgtttaatctcatcctcagtgagtaaaagccccgggatatttttccactgattatcttgacccggagcagttaccgcaccttggaacttgaacggagccggattgccttccacctctgtctcgttctggcctacggcgtagatcgtataagtcgaaccagcctccaacttatccttcccttccagcttaatggttctcttacggccatatttatattcctcgcaagtattgtcccagttgtccacatggatggtcttaatcaacttctgtgttccagtctcctctttaaagatatacagcatcacgtccgtcacatcctcggatcccctgttgtccgtactatacaagggacgagacttcgtgctgagcacgtccgtatcttgcatatccaacacgattacctgttcaccggtggcaacctcgttacccggtccgtccaagataggatcgtcatcgttgccacaagaagtgaacgctaacagaccgcacaaagcggccgcgccaaagaaataattctttttcatttgcttcttcttttaaatgttaaacttcggttttatctataaataacgttattccacatccatgatatgtagggtctcccagttgtcgtttatcaagatgaagatcttgaaacggcagcaacaggggtcgtactcgtagcgcaagatggtcagctcgttgcggctcatcgtcacgcagaccggctccggggcgatccagttgccgccctccgagggcctgtcgcccacgtggtagcgcagatcaacctgcgatgcgccccgtttccgggagggggccaacaggctcttcgccaccatggccggctcctcgcgctcccagctacggtcgaaggccaacgtcgtcggctcgcgatagcccccctcggcactgaaacggctcatgatatccgataccttccactcgctgaaggcatacgcctcgggcatcctctcggtagccaggatcagcttgcccttcaagcgcctcatgccgcacgagaaacgctcgctatccaaggcatataccagcgtatcgcgggtgaaataggcgtcgctaccctccgcgccgcagggatgcagccccagcgaagcgagatcgctgtcgaaagccgcggtatcgccaaggttgccccaggctgtcagcacgtaagagccgtagggaaggtcggccggtaggggcacctccacgcttcccgcgtcgccttccacgggtgacagcgcgcgctcggccacgacacggcccgtctccaaatcgctcacccgataggccaagtccgacacatactccctgaagggaagatcctccggacgctcctcctcgtaacccaggcgagccgccgccgcgctgttgacataattcttatccgccacctccagcgagagacgcaacggcggacaaggctccagctcgtcgcggatgcagccgcacagcagcgccatagccaatccacccaacagggttattccatgcaaatgttttctttccatcattttacgcctcctttccggctgttcgtcatctgccattcatgctcgagcacggccaagttgttcttcccgacctccgaagccggataataagcaagcaacttacggtacgcctcgatcttttcggccaacgaaggcatcagttccgccacgcggaaaaactcctcctcgctgaacgcgtccggccgggtggcatacatccgcaacagttcctcgtcggaagtgaaactcttcagcgtgtaggtgtaacggtactccaccttgcggtcgcgttgcagatagttcgtgcggatacgttcccagcaggacagacgacggatctcgcgctcctgcacatcatcgttgttgccgtcggcgggataacgctccaggatagcctccacatcggctgcatccgggtcaccggcttgccgcatggcttccaacaccggctcccaaccttcgggacggacatcggcaaggatacgctccttcatctccggggctatcgccatcctgtcttgcagccagcggccggcagccaccgcccgttggtacgcaaggttcgtgttgaacccgaacgggccatcggcagatgccatcccgatgatgtgtatggagtgtacgctcgccaacgaatcttccaaaatcgggcgtaacgtcttcgccattttctccagttccgcccggttgtcacccagcgagccgtctatgtccgaacgattgatggtaaactgcaagacggcgatcccttttccctccatcactttcgggcgcttcgccagcgtggggcggatccattggagcgagaaggtatccacaggctccgattgccgaagcttagccacaaacaaggtatctataattccgcatgacgcacatccctcgacggagaccaacgcgtctatataggcatcatcccagccttcaggaaccgcgacccgcgtctcgtaaggtatctccatcaactcagaccaacggtcggcacggacaacctgcccgggcagggagtcgacatacccttccagcacctttttcctatatattttcttcgcataaaccggcgcatcaacggctaccggctcatacatatccgccacctcgccatcgggtgccaccaaacggggcgtaataagcaaacgtccccttttcgacaaataatccaccggcacctgaaacttcattttcaccgttcccttgcttgagggatcaagcatcacctcacccaacctcggagacacggagacaccaacgggtgtcttgaccggcgagcaactcccgaatatccccaaggaaaaaagagcgaccaacaatttttgtgaatgaaatctcataccgttagaatatataaatcaatgacagggcagctttggtaggcccgaaatagttcttatgtttgtcttctccgcacttctcgcaatagacgcgggggctctcctcataccacaggcgggcatagccgataccgatggcggcctccaggttccaatgcggcgagagaatccagtcgtacccgtaagtgaaacctcctccggccagatagccatcgtagcgtttcttcttgaatcccccgaagtactgtgccccatgcaagtgcataccgacaaagtgcccctcggacttctcgcagaaccaatatttcaactcaggttgtaccagccagaaacgcatcttcttgtcgtccttgaatgtccaaggattgtaggatccggacagttccagcgtatatctcgggctaagagctacttccaatcctagattcggcgtagtggtcgcccacatcaaggtattggtcttcaatgccacgtcttgcgacttggctgtttgcgcaacccacaaaaccaatagaaaaaataataaaaccttatatctcatcatttattatttgttttttgtccgccttccggcacatgacactctttcgctatcaggcgactgacatatcggcagtggcatacagaacaacgcttcttcgttcttacgaaatgcggcctcccgccgtatctatgcatacttctcttttccggttaccctttcagagccttccttctagccatacacaaaaaaacttaaaagttcttcctcttacaaagagggggaacttttgttgaaaaacgaactttgttattgatatatagtgtattataataatacgctcatcagttccaatgataaaaaagcgatccctgttctattttttagtcaataattataattaaagaaaaacaatgaaatcgagacggaacatatccaatgatctgaagtatacaaaagagcactttgtctgtgaaaattatatttctgatgaacgatccatcttggagcctatagaggtaaagggcggcgaatatctgatacgggaagaagtggaacgtttcacgcttggatttattctttccggggagatggatatatcgactgccggatctgtatgccaacgggtgggtgaaaaacagatgtttctcatagctgccggtgacaattttcatggaagagcgattacggatatctccctgatgcgttgttcgttcactagagatatgtccttatgcaatcgtttctccattgaacagttacaaaaatatatcccgctaggtttccaacaagaaaaatacgggattaccttacttcccatccatgaattgttattcaaggaacttgaagtgacacgggagatcatgcgaacaggaatgtcatgcattcattatcagcgcatcaaaaaagagatgttatttattgaattgcgcggattttatcagaaagaggatttggctagattcttcgcgccaatcctgggcacggataatgatttcaaggaaaatgtattacaaatatatccacaggtagaaaccgctcaggaattgattgacaggttaaatatgtctcctagtgcattcaaacgaaaattccgggagactttcggtatatcggctcgccaatggctaattcgtaaaaaagaacaaaaattaatcagggacattttgatgaccaatatatccatagcagaactcgctgaaaaatacaaatttacggccaactatatgaccacgttttgtcggaaacattttggcaaatcaccgacagagctgcgcttggaacacaagaagtaaacctttttatagcctatacactatagtactgtctctttattatatgtagagggacaagattttcatgtatcttcacatccatcactacaactcatcttatcatggtctatttttgtagttttaaggactacttttgttgccgcctatatttcaattatatctacttttgcggtcgaaataaaagttctttataaaagttccccctctttgtaagaggaagcacttttattcgagacaaaaatataatttcccaacgaattactcaaatcagaaatcctcaaatatccaattttcatggcttcccatcaggggatacgctttctgaacagcgaggttatcacccgttgattggccatggcaaccataccgatatccaacgaggccaggtagatagttgtcacccctacgtgactatgccccatcgcctcgctgattaccgtatcacttgtcccgcattgtcgggcaagcgaggcccaagtatggcgggccacgtacgatgttaacggctcgtccagttccaacaaggaggaaaggctgtccagacgcttgttatagacacgcaaggcactcgaatactcccgttctgtctttttttccggatcatacaggatagggaacaaataggggcagcccggatcggataccatgtaccgatctatgataatctgcgcctgcgggtgtatcttgaccctcaactgacgattggttttcctgcgctggtaagtgatacatccgttccttacttgttcctttttgagataagccatgtcaataaagggcattccctgcatatagatactgaacaaaaacaggtctcgggcaaatccgagcatctccttgtcaataagggagagaatcgccagacgtttgacaaccccgccgtcaacggctcgcttgcgagttttttcctgcccggtgaacgatttgcggaaaggacgcttgtccatctgtatgatctcctcgtctaacgcataattgtaaacggcccggagttccctgttgtacagcgaaatggtattcatcctcagtccctcgccgattaaatatgattggaaatccttcatctgtccgacagtcagatcttcgatagcgatgtcctgatcccccctgaaccgtttgaaatgcttaaaggcgcaaatgtaattactcgccgttttcttcttgtccagcctttcgaaatacaagattctttgttcaataaggttgaaaaagcttaacttcttctcttttctttgttgttttcctttttttctctccatactttacgtttttaatttaaccaaacatcatataataccgtcaacagcgagaacggtaattctttgattacataaaataggatattttctggaaatttcatggagaacagacggataccagtgagttccctataatcaaagataaatcaaaaccgtattgtcacgggcgttccggcttcgctttccatgagtattttccttgcgacaagtcgcggaaaatactcatggaaacaaacgcccggacaatggttttgatttcgggaaggattatagggactcactgcgaccgacgcgacgcatgaccgtgtcattgatgaaaaaaggagggcctcctttatatccctaataaatccggcaggaagtacgggatatatgggcagacctggcaatgtcttatgaaaaaacaccgccccatgagaagacagggacttcagctccctctgctctgcataatcctccctttgcgcccgtgcctacttcttcgcccttcctccgcataccatatccttgttttcacggcatgtttctctcacggaaaaccagtctttcggacatttgacgacatctgatgacatctgatgacacctttttgaaaatcagagttttattcggatttagcccatatttttgaagtgtcaaagcaatttattaaccccaaaaagaaaaggtatgacacaagaaaagagcccgaacgggaagcctagacggacccggaaaccgaaggtcacgaacgacgcccctttggtggaacagatcaccgagctgatgatggttcataacaagagcgatccgaaagccggtgtacaagtggtcagcgagatcgacaaggacgggaaggtcaagacggttccggcggacgagaagaatgaaaactcattcctgaaattcgacaagaactcgagcatactcgaaaacttcatcaagaatttctggagccagctcaaggaaccgacccatttccgcctgctccgcatgaccttccacgactacaaggtgaacaagcaggcgatcaaggacctggcggaagggaaaaagacggacgcggtgaaggagttcctcaaacgctatgagatccgtccgagagagaacaaggaggaacaaaacatgaataaacaagagacagccatggcaaaaaaagaaacgcaaccgcaggaacccctgcaacagagtgaggtacaacaggcatcccagcaacggcagcaaccgcaggcacagcaggtgccacaagagccgcaaggcccgcgttatcgttacaatgagaacatgatcgactgggagggattggacaagatcggtatctcaaaggcgacactcgaacagcaaggacttctcgactccatgctgagaggttacaagaccaacaagctggtgccgctgacacttaacattcccggcgtgctgacagccaaactggacgcgaggctctcgctcataccgcaagagaacgggcaggtggggctggccgttcacggcatacgcaaggaaccgcaactggaacgcccttatttcggatttaactttagcgaggaggacaagaagaacctgcgtgagaccggcaacatgggacgtgcggtggaactcaacctgcgtggcagcgagtacaccccctgcctgatctccatcgacaaaaacaccaacgagctggtcgccgtccggcaggaacatgtctacatcccgcaggaagtgagcggggtaagacttacggacgaggagatcagactgctgaaggagggacaacccgtcaaggtggaggggatgacctccaaggcggggaaggaatttgacgccacgctccaatacagcgccgagcgcaggggactggagttcatcttcccgaagaaccaggtattcaacgagaaatccatcgggggcgtaccgctctcacctacccaaataaagatgctcagcgagggacataccatcctagtcgaggacatgaagttcaagaacagggacggggctttctccgcgtttgtcacgatagaccagacgactggacggccaaattatacccgccataatccggaaaccggagaaatctatattcccaaggagatatgcagcgtacaactgacccccgaggataaggagaccttacgcaaggggcaggccgtctatctggaaaacatgatcaaccgcaagggagaggaattctccgcgtttgtcaagctggacatgaataccggcaggacgatgtactcacgcacgccggacgggttcaacgagcagcaggcgccacgtatcccggcggaggtttacggccatgtgttcacggcgcaggaaaaggcgaacctccaggacggaaagaccctccttgttgaagggttgaaaaacaacgggcaaacgttcagctcctacctgaaagtgaacccttattccgggcagttgcagtatttccaggagaacccggatatccgcagggacacttcccgtcaggcgacacaggcggataccgcccaaggccagcagcaggaacaaaagaaaggggcaaaacaagcggtataaccccgatcggaaagagacaaagtcagttttacaaacatcaaatccccaaaccgtatgaatacgaatcggaacatcccttatatttataatgtaaaagatattgactggaccgctctgaaagccgtgggtatcggcaaggaacaactggaagcggacggcagcctcgacctgttgttgcaaggcaaggagtcggaaatcatcccgttgagactttgtaccccggttatcagcctgaccatggacgccacactcaaactggtacccggtgacaacaacaagccaatcatggaaatcaacggcctccgccaggaggaaccttcaaagaaataacaaaaaaataaaacaagtttaacctatcccccgtaccgcccaatccggtacgggacatcaaaaaagaagaatatgatcgcaatagtgactgacaggcccaacgtgggcagagagatagcaagagtgttgggagccgacagaaaggagaacggctatatgaccgggaacggctacatggtgacatggacatatggcaacatgctttccctggcaatgccgaaggattcagggacagcccgtgtggaatggaaagactttcccctgctgccgccttccttcctgacagtaaggcacgtgaagacggataccggatggaatcccgacatcaacgcgctcctccaattgaagataatagccaaagtactcaatgcgtgtgacactatcattgcggcaaccgacgcttcccgggaaggagagatgctgttccgtcatctttacggctttctggagtgcaaacaaccctgcctccgcctttggatctcgtctctgacggacgaggccatcacggaaggcatggcgagcctccttccatgtgaccggttcgacaacctgttccaggcggcggacagccgtaaccgggcggactggctcctgggagtcaattcaagctatgccatctgtaaggcggtaggcttcgggaacaattcgctgggcagggtacagacccccgtactggcggagatatgcagacggtaccgggagagggagaatttcctgccagccgacagctggcaggtattcgtcagtctctgcaaggaccgacaaatcataaaactgcgccacacggaagattttcaggagtaccggtacgcgtcagaactgtacggtgactgcaaggcggtacggaacgcacgtatcgcggcggtcaaccgcgagagcgaggacatccgggcaccggctccctacaacctgaccgaacttcagaaggacgcgaaccgttaccacaacctgacagccatacaggtacaggatatcacccaaggcctgtacgaaaagaaactgatctcctatccgcgtaccgccagccgcctgctgacaagggacgtatatgacacgttgcccgctgtcatggaaaagattctttcccgcaaggaattccgccaatacgccaaaatgacggactttgccgcgccgccaagcgacatcagcgcacaggggacgacagatcaccacgcgatcattgtcaccggcatgccccccggaacattgaacaaggaggaacaactggtctatacgctcattctcggcaggacactcgaagccttcatgccatcctgccgggtggaatatacgaccatcgacgtagtatgtgccgcacggaagttcagcgtccaaacgtaccgcgtcctgaaaaaggggtggctcagcatcttcgggcgggaacatcttatcgcaagggggggtatgccctgttccgcacttccggatttctccccgggagagccggtaccggtaagcggatgcaatatcgtccgcaagagaacacttccggtatccccctatacggatgaggagctggtcggctatatggaccggagcggattagggaccgtctccacacgtaccaatatcatccgcacactgctggagcgtaaatatatccgctattcaggcaaatatgtcatccccaccccaaaagggcttttcttctatgaaacggtatgtgggatgaaagtggccgacacctccctcacttccggatgggaagcggaactggcacggatagaacagggaaaactcacgcaagaggagttcctgggaggggtactggaacaggtgaaggaggtgaccggtgagatattccggatctatcaggctaaaaacaacccgtaggatattacgccaccggcacgggacgattctcaaaagagcagggagtacaggctttcaatgccgtactccttttttcatgggagattggatagtttttccgcttttaaccggcaaaggtcttggattgcctcgtttttgccgcaaggcggccccctttgggggcttggttggtcaaaagaaaatcatcctcgctacgctgcggtattttcttttgccaagccttgcgcaaaaaggcaatccaagggccggaggcctataaaatcgggaaaacatatcccgatgggattattcattcttaaaaatttaaagatatgaaactgcgactcatcgaaaacatctgcaagcgagtgatctcactggtcctgcttacgggaatatgcctgctctacagcaagggaatcattcccgtgtacctgatcgtcctgttccttttatcgggaacaatcataggattcttcttcagggcattcctccttgtggtaaaagtcatccttatcctgtccgtcatgggcatgcttgtataactcctaaaatacaaaaaacatgagaactgcgacatccaccccctcagccccggtcatgccggtcgcatggcccgtcacaaaacgcataaaacctgttaaaaaacggttccccggcatattggacgaactgaaaacaataggccactacctggagccattaaaggacatcgcgtccaatcccgacaggcagagactcctgaaagagtttttccaagagacttatgtataacttattaatattttaccattatgttttttcaaacgatcaaccgaatgattacggcaggcacagacctgagtatcaacatcagacaagtgaatgacaagctgaccgtggccgtcatgccccggcgtgcgggactgaaagacgaggccggggaacaaatcgtcccgctggtattgaacggtaccccggaagagctggacatggaattcctgggagcgatcaccgcacccgtacagaaggcgcagggcatccttaccaacctggaaacattcgagaaacaagcggaacaggccgtatcacaaagcaaggcggccaagtccgtagctgagaaggaatcaaaagaggtacgcgagaaacgggagaagatggaaaagctgcttaaaaaggcggaggacgccacaggcggcaaacgctattccgaggcgttgacctggctcagacaggcaaaacggctggccatgccggacaagcagaaggagattgacgtgaagatagtggaggtacagaaaaaagcgtccgagggcagtctcttcggagcggaaccggtaatgccggaaccacagcccgcgcaggttatccaaccggtggcggcgccaccggtacccggtcatgccccccgatatcagggaggggaacagatacggatgttcgcgcccgaacaaccgtcccgccaatctccccaccagattccgcggtcggtacaaggcacgcgaccacaacaggttccacacggacaggcggcttcacgaccaagagcggatggtacaccggccggctgtcagcagcccgtgaaccgaccgcagaccatacaattccaccagccggtacagatgccgcaatcacaggtatacgacggtcaatggctgcaacccgtcccttcgcaaccgcaaacggcttccacgcaaactgttcccgataacaaaggggaaagcgaatacggggcacgagcgcaggacatgggacagtacggcttcgacaaggacgacgagcatgacagggagctcctgcgtgaggacccttatgcggaatatctcgacttcccggaggaataccgcatgaaagacgaggcacaaatagaaatgatatgttgttaacccctataaaaatacaattatggcactagaaattaaaggattgcagagagttttcaaattcaggaaaggctcgtcggaaatagaactggccgatccggacaacagcctgtccccgaacgaggtgatggatttctattccatgacctatccggaactgaccacggcgagcgtacacggtccggaatgcgaggatgacagcgtggtctaccggttcaagacgaccatcggaacaaaagggtagatatatggcaaagagaatttccatcaaaaaaaaggaggatacatgcaaaacgctatcagaatcacaaatggcgggactggccgtattgatcatcagggccgccgacctctcgtacatcggacggggtacgatgggccgggaaaaaagaagactgccgccaccggggagcgtaacgcttttctgacaagcagattcatccccatcgcggaggactatctagtggaggacgaaacgggaggggcatgcgtcaacctgaccacgtccgaaaactttgactatctataccggtccgccctgcgatatgccgatctcatgaatgtcaggctccctttccgcacgaggaaagggagcggtccccgcatcaacatcaccgccttgtacaaggccctggacgagaccttgccggaacatgtcaatctggaggaaagggccgggaggctccatttctgcctgtacaggttccatgactggccggaccataccctgttctggctacccgtcgatttcacggagagccttcctgtaccgttacggcgtatcgtccgggaattcatacggcagttcgtacgttaccacgggttgaacgccgtcacggaaacatggtattatgagctggcggtggaagaactggatgactggaagaaccgcgatcccgaggcttcccctcagacaatccgtaaatacaaacgcctggcggaatcctaccaatccgggaaaatcgcaaaaacacttaaacgaatggaagggaaaccgttttgtaccgatctggaagaaaaggtccggaaatactgggcggcagtgaaggaggaacggaagcttttggaactgatacgggaagggatgggactgattaccccaggaaatccgtgcatcatgcaatacggttacgactgggcgtatgaaagatcaccggatttccccccgatcgacctggactgtcagatcatgctggcatattccaacaatgacgccctcacggagaacatggaatgctatttcaactcggactaccgggagacgtatgccatcaccccggtcacaagcatgtatctgacacctgagacggacagactgttccggatggacgactatccggagagactgtcaggatggatggaacggttcacgcaatgcataaacaggcattttaaagtgcccgtttcccaataaataaagaaacgaaaacaaaaaaatacaggatatgaacgaactaaccaagcaactgcaagagataatggtgcccaaagcggcgctgatcgcctatgagtaccaggaaagtcactacgcaagcggaagtcactacctggaactacgccctatcaacaaaaagggaagaatggaagccggcattccggttacatatgaattcatggactccctggtggaatcctattcggacgggaaccggcgtatcccgcacgggtggctgccacccaacatgctgtggtgcgatacccgcagggggcatgaaagctatgtgtggtataatccgccgggaaaacggcggatgtttttcaagaacgacctgaacatcggggatggaatgttccacgtgccgggagtcatttatatcattaaaaatgaaaggatggacatcttcgcctacaaggggaaaaaaccggacgggaggacaccgctctatctggccccttttttcaacgtgaccggtggaagcgtatgcctgggaaactccacactggagaaaccggagagcctggattttcacaccctgttggaatattgggagaaacgtttctggctcagtgaattttcccatcttggaggagggaagaacccgacgagaaacaatctggtcctggttactgagcggatgcgtgaacagccgttcgacaacgacgaactccaaccgatcaacaaacgattgaaagacatcctgccatgagaaagatccatttcacagacaagtacctgctcagtccctatcaccccgtaaccgtcctggtagccggggcgggtggaaccggctcgcaggtaataaccaacctagcacgcatgagcgtggcattacaggctctgggacatccggggctgcacctgacggctttcgaccccgacactgtcacggaagcaaacatcggccgccagctgttcagcgagacggaactggggttgaacaaggcgacggcgcttgtcacccgcatcaaccgttttttcggttacgcgtgggaggccagggaatgccgctatccgatcatagccaaagaaggggataaaaacgtcccgctggcgaacatcatcatcacctgtacggacaacacccgttcccggctcgacctgtggcggttcctgaagaaatacagggaatataaaaataacgatgagaaagcgccgatatactggatggatttcgggaacgcccaaaccaccgggcaagtcctggtaggcaatatccggagcaaaataagccagcccgcatccagcgaataccttcccatgcccaggatgaatgtcatcaccgaggaggtcagctactccaccatcagggaggaggactcaggcccgagttgctcgctcgcggaggcgttgcgcaagcaggacctgttcatcaactccatgctggcacaaatcggttgcgacatcctctggcgcatgttcagagaagggaggacattctaccggggggcctatctcaaccttgacacgctacgggtaaatcccattccggtataaacggacgtggatttattcccggtcattcctgccgtacggtccgacctttcatccgtacggcactcgccactcccttttccgtcatgaccagctcgtaccgttccaacctttcatagagcttgcccaatgtcttgcatccgtatctcttgaccttgaatttgggcatcattttcttcaacgagccgcctatcagggaaagggagacctcctccttgccgtcagccgcctgctggaaagccttgtcaaaaaactccatatcccttcggataaaaaaatccggggtgttctccaaggtcttgttttccttacggtcggcatacaggaatacggaacaggagcgtatcagcgatacggaagtcttgccctccccatatcccagtaccttcaatcccgcctcccgtatccgttgcgccaacgggttgtagtcaccgtcactggcgaccagacagaaacagtccacccggccgtcacggaggatgtccatggcgtctatgaccaacgcgatatccgtagtgttctttcctgaagcataggaggaggcctgcaccaacctgaacccatattcccgggcggtctccttccatccggaaagagctttcctcgtccagtcaccgtatatccgtctgataacggcatccccataacgggaaacaaagcccatgatatcctccatcctctcaaaggacgcgttgtcaccgtcaatcagaaccgcaatgagatattttgaattggtatttgtcttcataacaaccgtttataagacaaagttagcataacttccgcatatccacattgccccgttcagtttttctttccccgtttctgcaaaaaatcctgtatatccgaactcctgtagaaattcttgccgttctcatccgtctggtaataacggatcagtcctttttcccggtaacgggccacggtccgaagcgacacgttgagcagcctggctatgtcatagttgtccagaagctcgtcaccgttcaagaactccttcacacgacccatcctatccagtttcttctctatgcggtcaaatccttccactatggtcattatcattttctcgagcacttcattatctatatacatcatggcatgtatctcctgtattttttaaaggttactactgaaatacccccggtgcgcactgtaagagtatataccattttattatgaaaaatgtatgccatacctcctttatgtcttttaagcagcattataacatattgataattagatgtaaattatatttttcttccttttcgaatgtaacaggtgtaaacaggtaaagtgtaaaactgtaaaatacggattgtaaactttacatattaccggccatccgctaccgccatgccttatctttccggggaacaggctaaaaatatcataaaccaatgtatatctgacatctgatgacatctgatgacgtttgcggacacctttttggatatgagtctccctctccatactttcgtatcaaatcaaaaaaaggaaagacttatggaatttgtgtgtatcgaggccaagacattcatggaaatgaacgaggccctggaagccatcgccagaagagtacatgagacatgcggaggaagcacgcggggcatggatgagtggatcgacaaccaggaggcatgtacgcttatggatgtctcgccaaggaaaatgttacaactccggagaagcgggtccgtcccctacagttacatagaccgtaaagtatattacaaacggcaggatatcatccgctttatggaggcggaaattcatcgggtgacacctcaaaatcgaatgatatgatccaatccatgctgaccaaggaaagcccggaaatcatacgctttttccggaatattgagagcctgtccgaaatactggacacacaggcggaaaagatgcggccggtcctgaatggcgaacgttatatgaccgacagcgagctggccgggcacctgaaactgacacggaggacactggctgagtacaggataacaggtaaactgccttattacaaagtgggaggcaaattattgtacaaggaaaaggacatcctcgtgctgttggaaagaaacaggatggaggcttttgattatagatgatcctgtctgtggccactagtgtcgtattcctatttcttacccgcaaaggccaccttttgccccggttgcgcaaggcggtcctttggaccggttgcagaaaaatcatcctcacttcgagagggcactgaaaaataagaactttttcagatccctttcgattgagtcctaaaaaatgagttcgccaaatccgagaatagggatttggcgagctttttgtttttatacacccatgacttccaaagttcttcatatgtgtatctcatatccatgaaagtgccatttatccaaagaacttcgtaatggcaaataacggaatattctccatccattcctgatcttgataccccatcatggagacgcgcagtcctttcaactgataatcgggatgatttttaatatattccgacatggaacgcgcacgtacattctcttcggctttcacttccaccggtatcacgcgatgctccgtctgtaccacaaagtcaatctccgcaggtgttttgtcactgctccaataatagggcgaaaagccttgggccactaattgctgcaagacaaactgttcggtaaaagcgcccttgaactccttgaatacattatctcctaccagcatctggctggcgggcgcctcggtcatacaacctaaaagaccgcaatcaagcaggaataatttgaaggcacccagatcttcgtaaaatttgacaggcatctgcagttcttttatccggctgactttatgtaccagacctgcatccatcagccactgaatggcgagttcatattccgtagctctggctcctttcttcaacacattatagatgaatttcttgttctccttggccaactgcgaaggcaaggattgcagcacttgtccgatacgtatactttcagtaggtgtcgtatgcttggagatgtcccgccgataagcatcaaggatttcagtctgtttgtcacgtacttcctgcaagttttgatgctgaaagaaacaatccaccacttcaggcatgccacctacataatagtattggcgaagcaaatcaacatattttaaactgagaatctttaaaatttcccaatcgggctgacgcaacaaatcgcacaaatcagtttcaccggcagccatcagaaattcttcaaaatccatcggatatagatgcattacatttaccttacccaccggaaaggactgacctttccccaaagtaattcctaacaaggagccagccgccatcacatgatattcaggcgcattttcctgaaaatatttcaagctatgcaatccccgttccacttcctgcaactcatcgaatacaatcaacgtttttcctgcttcaatcttcgttcctgtgatagcctgaagtgccagcaaaatacgggggatgttatagtcggctgcaaataactccttggccagtggctcgacatcacagttgatgtaggctacgttctcaaactctgtctgaccaaaatgtttcatcacccaagttttaccaacctgacgagcacccaacagtatcaaaggttttctcgcaggattatctttccaaagtttcaactgttgtataatcttccgtttcatcgattcctttaaaataagaattattcacttgtctcttgcaaagatacattttttcgaggataaaaaccaatatataatacacttttttgatgacaacctggagcaatatcacattttttagaggatacgatcttccagttgtaaaaacaagaatctttgcgaattcattaaaaaacatggtgccaattgtgacaaattcacaaacaggcagtcttatcaagaatagaacgagaaattgaagagaattatccaaacgaaatagttccaaatgaaaagagtcgaataactagtaatttctgtgatagtctgacggcagttctcaagacgttgaacatactatttttgtatcgtttcggacaatctttcatgtttcaacttgctgcttgtatgaacagtgctccctatgacaaatgtcagtcggggtattggcaagcgggctgtatagcggataaatacgtatcaaccatgcaactggcagataaagttaaaccactgtaagtgtgtcatattgcgttagccaaaaaggtttatgagttgcaagcagtgaatgaacacactgatatagaaacatcattctttggcttgtcgaatgccccctatataacaatactttatgcaggctacctctaatctattaaaaattgtccgaattatgattttgtcatttaatttgctatatttgcaaaacaattacaaatttaagggatgaaatgatacttgaaattcgtttgagcaacttcttctcaattaaagatgaggtggtactggatatgcaggcagcaagcatacagacaaaaaaggcaaaggagcttgaagaaaatacatttgtatgcggtgatgagcggttgcttaaaactgttgccatttatggtgcaaatgcgtcaggaaagagcagccttatcaaggctattcgcgcttgtgtgggaatgatattctcatctcataattacaatgagaatacgatatttgcctttactccattcaaattcggaggcattggcaagccaagtacattcttcattcgcttcctccttgaaggtatcgaatatgaatattcttttgaactcaataaagttgagatactgaaagaggcactttactattatccgaatggccgtcgttcactggtattttcccgtgatgaaacaaagggacccgacaaaaagaatatctatgaattccgctcggtgattcgccgccctatggatgttgctgccaatacatccaaaaaaacgcttttcgtgtcacgcgccagtcagatggatcgagatacagcaaaagatgtttttcgatatttcaatgagcgttttattctgagttatttcggatataattcgttctctgtcgagcgcttgttgaatgagaacaaagaacagttccttaatgtgctgcgaattgctgatagcgacattgtcaaaatcgacagcaggcacgagaataaagtattttcgactgcagtgattgaccctgcagacaatcaaatattgtcggtagaagatattcagaaaccacagctggtcattacgacctatcacagaaataacccggatgttcctttcaacttttttgcagaagagtctgatggaacacagcgtttattcaatatgatgctgacaatcctggatatcgtcaagaataataaaatcttgttgatagatgaaatcgaaacgcagctgcatataaaactggtagaatatattatcggtttgttcaataaaagcgaatcggcgcagttgatatatactacacacaatacatacctgcttaataccaacaagttacgtaaggatcagatatattttgttaacaaacgggatgacgggtcctcggatttgtattcgctgtttgattacaaagatttccgtgacgggctggatgcagaaaaggcatatctgcaaggtcgttttgatgccatcccgtatattgacgaacagacggataattttataaaatagaaactgatatgggacgacaaataagaaaatccaaaggcaaaacaatgaagccaaacttctttgttttctgtgaaggggagtctgaggttgcttatatcagccacctccgttcacaataccgtgcgcctattcaaattatcccaagaaagagcgattcgaacatatccgttcggtatatagagaattgtaaacgggaatatgttgtaaccaaaaatgataaaacattcctaatgtttgacctagatgtggacggaatgctggaacacctgctaagtattccagatgcgatattgatggtgtcgaatccatgtattgagttgtggtatttgctgcactttgagaagtgtcatgccgaactaacgcaaaacgtctgcatcaagaaactgaaaagacatcttgaacactacacaaagggaactttggcattaaatgagaaacagcaactgtctgaaaaaacatcagaagcaacggcaagagccaagatgctggatacatataataatccatcaactaccatctataaaatgatagaactgctggaaagtttgtaatttgaagattatggagaatagggaaataacattagctgatatctttcttgacatcttgtcagaatcacaagataaaggtgcaaaactaatggcagagcgaataaaagcagctattaaatcgccagagatattggagctggtaaatatatgtgttataaatgcattgggatataaatcaaaaattagcagcaaaaccgtagataatgcaattgatagtattgtcagttttgtacactctgaaattgatagtagtaatttatcggataatgataaagagaaagaaaagaattcatacaaacactttgcaaaaagtctcggtaaaatattaaaagagaatttacaggtggcgcaacagctaatataaaagaagtaattatggacatctataattggggataatattattcaagcagtggaatattggcaagtaatcggaggacagattcgtattcgttgaggcaaatccatgcgcaagacatcatatatcagaattatagcaccattaataggcaatacatgtaatgcattggaatgagattatcagaaccctcatggccagtccgaagtcataccacagttccttatgaaggtctaccttgaaagaggccttcttttccgccctaaaaggtgatttgtaccacacgctgtttccacgctgtattaccggttcatatccgaatccggctaaaaaatcaacaagtctgatgtcctttgcttcctgtatgttcataacatctcattttcatggatttgggcaaagaaccgctttatctctaaaacatgaaaagcaatggcatcagatgtcatcagaaatcatcagatggcacagggcttcttctatagatatgatttatatgaaaaacggatactggcagtattatacggtgtttttgcgaattaaccgcagaatattacctattattcggaaaataatcgtatttttgtagtgtgaaaagaacttctaaggtggattatatgaatgatataattaataaagttgcgtctctcggagggactatatccacaacggatatatctcacctgtcggaatataaacaggtgttgcgagctaaagaacgtggcgatttgataagattgcgtcatggggtatatgcagctcccgaggtattgctaaacacgatgatagacgtggagaggataataccgaatggtgttgtatgcctatacaatgcctggacatatcatcaactgtctacgacagtcccgcctgctttttgcatagccattgccaataaaaggaaagtagtgcttccacacgccctgcctatagaactttattattggaaaaaagagaacttggagtttgggattatggatgcggatatatcgggatataaagttcatattactgatatggaacgaagtgtttgtgatgcggtgaagtatcgaaacaagattggtctggacgtttgcgcggaagtaatacgtacttatctgaaaaagccgaaccgtaatctcgcccgtttgcaggattacgccaagcgtctaagagtgtttaacacgttgaaaaattatctcgaaatcgcaatagaataagataatgggaaagaaaaactatggcaagtctgtaaagacacgcttgctcaacctcatgaatgagacaggctataaatacatggtatcttctggcaagatacttcaacgagagactgctttacagggcttctgtaagccggtacaaggacaatttcttgttgaaaggcggctctttgctttatgccatgaatggactagaggctcgtcctacggttgatgtggattttatggcagacaggatcagtcgtgacagggatttcctggctcgtgtattccaagaaatcctgggtatcgtatgccatgaagatggggtatcttttgacgcaggaagtatcaaaatagaaccgattacattttggtacaagattctattttactgtccatatggataccatagcttataatatgtctgtagatattggctttggcgatgtcgtcattccacatccaacaactatagactttcctctgcttttaccggatatcccttctgtgaatatacaggcatattctttagaaaccgttattgccgagaagttccatacgatgatagatcgtgatgtcctcaacagtcgcatgaaagatttctttgactgttatcagctcctgacgaagagaaatttgaatgacgacgctttgtatgacgctatcgaagcgacgttcgacaatcgaggacttgcatacaactccgatttgcaactgtttacggatagttttgctacagacggggcacgcataagccgttggaaggcttttcttagaaaaattcaatggaaagaggcgcttgatttcgatactgtgatgaaggcaataagagacaggctacagcttatggctgaaagatattggataaaactctcaaaatagaattgagtaagatttagacaggctcttagccatcttttaggaacattatcaggtttgagcaaaaaatatttcataaaaatccctattgacatttgcggaaatcgaactttttatctacctttacgttattaaagagatgatgattgtaaagacaattacgaaaagcgatgaatttagtgtagtgctaattcaatggctttcataaaagataaagtagtaaatgtgcagtcaatcagggatttagaataaaccgaaataaaaggttcaattcctggtggcaccactgaaaatcaaagggttactcatatgagtaacccttctttatttttacctctctgcgatataaactccactaataatggctaaagcgccaataccagaagctatcgtaatagtttctgatagaaaaatcgcagaagttatcaaggtgaccagagggacaatgtaaatataattggctgtttttgatgctccgagggctctgactgccgtattccacatgatataacaaagcattgaggcgatgacacccagaaataatatatttaaatatacgactggcagtttcaataactctagtttgatatttaaagggtagatcgcaaaatagaagaaaagagaaagtatcccataaaaaaatacttttcgtgtaataaacaaggtgggataagaacgactcaaacgctttaggataaggcagtaaaaagcccacatcgtagcggcaactaaagtgagaaaatcaccaagtggatttacttttaaaagaacactgccgttgaaaacaactaatccgactccaaataaggcaactaaagatccatataacagtcctttcctaagagattctttataaaataggtgagacaatatcgttgtaatgatcggtgctgtacagatcaataatgaaacgttggaagccaatgtgatgcccagtgccgtattctccgctatgaagtatagggaaccaccacataatccagacaagaacaataagaattcatcttttacgcaattagcccacaaccgtcgatgcgctatagtcaaaatacaaaaatacgcaagcacgaaacggtataacaatatctcaaccggtgataatcctgtattaatcagtatttttgtggagacaaacgttgttccccatataatgactgtcaatatggcgatactatgatacagaagatctttacttttaaacataattgtgttagaattagatttttatttgctgcaaagttatttaaagaagattgttttcctatacgtcaagcttaaatacgataattttcctatttttgtcctgttttgcattctataattctaattcggggatattaaatcaaataaaacaggaaaaaaaactatggcactacttgatgagacagatattgaaattcttcattctttgcaaaaggacgcgaagatcaatgcaaaagagctttctgagaaacttcatatctccaagactcctatttacgaacgaatcaaacgtttagaaaacgaaggatatataaaaggatatgtggcattggtcgacaataaaaaaataggattacccttgatcattttctgtaatgtatctttagctgtacacgatgatgagcatatcgaacgcttcaaagaagaaatacggaatatcgatgaaataatggaatgttactcgacgggaggtatttatgatttctttgtcaaagtggttcttaaggatttagatgcctataatcaatttgtgttcgagaaattaaccaaggttcatggcatcgtgaagatgcaaagctcttttgtgcttaatgaaatcaagcatactacagttttgaatatacccaaaaatagttgattgaagcttaatgtcgcagtattaatatgaaatgtctcttttttactatagaattgattaggggttatttacctttgccccgataaattaaattctataagatgcagtcatttaaaataataaagcctattcatatattaactccttatgtgagatattattggatactggaagatggcgcggatgtttctgtatctgaacggactttaccaacgggctgcatacaattagtatttcataggggtaaaaggcttttattagtaggaaaaaaagaatcgcagcctcaagcgttcatctgtgggcaatgcctcaacttttcagatgtgatgtcagccggaaagattgaaatgatcacggttgtttttcagccgtacgcggcaagagccatccttcaacttccccttaagttcttttatggagaacttatagcggtggatgctatagaagatttggaattatcaatattatccagaaaagtgatagaggctgatgatcatgaaacttgcatccgcttgatcgagcagtttttgattcaccgtctttataggtttgaaggctatgaatataacttaaagcgaatatccgcagtcctccatcaaataaatgaacaagcgaaaactaatatttctgagttatctgaaaccgcatgcctaagttctaaacagttcaaccgcattttcttagattatgtaggagctacgcccaaagagtttcttcgtatcgttaggatgcaacgggctttatttaaggtacaacagaatccatccatttcattcgctcaattagcttatgaatgtgggttttcagatcagtcacatatgataaaagagtttaagctgttttccggctatacacccacggagtatctttccttatgcgctccttattctgattatttctcggagtgatcaagatgtcctttttcttctatcctatagatacgatacgctctacttttgtgatgtcttcgcgaggacattaacagtaactataaaaagaaaacaaaatgaacaatttaattgcttttttcgagattccaactgtagacttttatcgagcgatcaatttctatgaaactattttggggttaaaactatcggttttcgagtgtgagacagagaagatggcttgttttatcgagcaaggagaagtggttggggctttgttctacgctcctagttatcaaccttcgccggatggtatcttaatccattttaatagccaagatatcgaggacactttatctaaagtattggataaagggggtaaaattattatacccaagacaaagattgaagcggaaaataaaggatacttcgccgttttagaagatagcgaaggaaatcatgtcggtatctacgaaaaataagtatcttcggccaagatatccctacaatatataatatgaaagaaaataagtatgatgatgaacgctttttcggtcaatacagtcagatgtctcgctctgtacaagggctgagaggagcaggagaatggcatgagctaaagaagatgttgcctgattttaacggaaagcgtgtattggatttagggtgtggttttggctggcattgtcgatatgccatagagcgaggggcgaccttcgctttaggcattgacctttccgggaagatgttagacaaggcacgggagataaattcctccccgttgatcgaatataaaagaatagcaatcgaggattttgattttgctccaaattcttttgacatcgtgatcagctccttgacattccattatctcgagtcgttcgatacggtttgtacagaggtatataaatgtttaacgcaagagggtgtctttgtcttctctgtggaacatcccgtttttactgcttatggcaatcaagattggatttacgattcggaagggaaacctgcgcattggccggtggatcattattttcaagagggaatccggcatgctcattttttgggagaggatgtaaccaaatatcataagacacttacgacttacgtgaacggattgatcaaggcgggtttctgtatcacctatctggtggagcctcaaccggacgaatcgatgctggatacggttcccgagatgcgagacgaacttcgccgtccaatgatgttgcttatcgccgctcgaaagaattaaaaaaaagcgtatctttgtggctgaaaagatgtcttttccgtgtgcttgctaaaccacgtattaaaaacaagaaagatatgaaacaacaagatgccgctttggtatgcttctcgggtggacaagattccacgacttgccttttctgggcgaagaagcatttttcacgtgtagaggccgtatgcttcacatacggacagaaacattccttggaaatagaggtcgctcgaaagatcgctgcggatgcggacgtaccttttcagttattggacgtatcgcttatcagccagttagatcccaattgctcgcttacgaatgcgagcatagagatggatcaagagaagccggaggatagctatccgaatacgtttgtgcccggccgtaatatggtattccttactttcgccgctatcttagcccgtggtaaggggatttatcatttggtaacgggtgtctccgaggctgattatagtggttatccggattgccgggatacgttcgtgcgttctcttaacgtaacattaaatctggcgatggatgagcaattcgtaattcataccccgcttatggaccgggataagagcgaagtctgggaattgtcggacgaactgggcgtctttgatctagtacgtacgcagacgctgacttgctataacggtgttatggctgagggatgtgggcattgtccggcttgcaaacttcgtaaggacggattggagaaatacctgaaaaggaaagaagagaatcaaaagtaaatgaaagaaatggacgagagaaaacaagaaggagagttgcatttattaggtggctctaccgtatataaacaggattacgctccggaggtattggaggcatttacgaacaagcatcaaggaaatgattattgggtacggtttaattgcccggaattcaccagtctctgcccgattactggacaaccggatttcgctacgattcatatcgattatatccccgacgtgaaaatggtagagagcaagagcttgaagctttacttattcagcttccgcaaccatggggcgtttcatgaggattgcgtgaatattatcatgaaggacttgataaaattaatggatccgaaatatatcgaaattactggtatattcacaccgagaggcggtataagtatttatccgtattgcaattacggtcgtccgaacaccaagtttgagcagttggccgagaaaagattatttgatcataatcaataagatttctgacaaatcgttatcagtctcggcaaaaaacggtatatttgcagcaagaaatgttaactaactaataaatcattttagaccatgaacaaaagattgcttacagttgcggctttcgctttagcgggttgcgttaccgttgtcgctcaagacaagaaaaaagagttcaagatgcctacaggttatgcgggtatcacgcatgagatgtccgagttttacgaacctgttccgccggtagtcactccgggtacagatttaaaaggtggaggtttcacggctccttccgacgctatcgttttgtttgacggcaaggatctttccgcttgggagagcgtaaagggcggtgctgccgaatgggatgtgcatgatggtgtatttaccgtaaacaagaagaagggtgatatccagaccaaacagaaattcaacgatttccagatgcatatcgaatggcaagtcccgacgaatatcactggagagagccagtcgagaggcaacagcggtattttcctacaagggatgtatgaggttcaagtgttagactgctacaataacccgacttacgtgaacggccagacgggtagtatctacaaacaatccattcctttggccaacgccatgcgtaaaccgggtgaatggaacgtgtacgatatcatttataccgcccccactttcaaggaagatggttcttatcgcacgcatccaaccgtaacggttatccagaacggcgtggttttgcagaaccatacgacgatattgggtacgacagagtggatcggtttcccacaagtgaagaaacatggcgcaggccctatcatcctgcagagccatggcgatcctagcgagccgatcagcttccgtaatatctggattcgtgagctataggagaaacgtattgattgtaataagaagggatggacttgatattaagttcatccctttttcgttaaataacaggctggttttatatgagagaaacatttttttctatagcacgaaattttagttttccttagatgaaacaaaagttttccaatggagaaactctagtttcctgctgaaaaaactttagtttttcgataatgaaattaacaaaaactgtaattggctgattaatagcaattatactattatctcttctccggcatatatttccaaaaacgagccggcatatgttggcgatgaagccgtgggtttaaacgctccttgatagcgatagacttaaaatactccttccacatactttgaaaaagcttctcatccttatccatgatatcctcactgagcaatccggtcaataaatgtgaatctttttcttcgaaacggacttctatcgtatcgttaagatcataataatatccatactctctttttaagtcgtaaatgagccattgctgatcagcgaaacggtcttgcgcataaggtaataccaaaggtaatacgttatatataggtgcgatggcagcaaagtaagttccatccgccgctttttggaaacgaaagaattgcatcactcgcaagcgttcgttgtttactttcttccagatcttggccgtttccaatatgtccgggtcaccaagattgaactcaatcgtggctggagcgtcgatcgctttgcggatatatctgaataacaacaggtctacttccggtaattccgacaaccaagttaccgtcaacccggaaagagaagacttggagattttcttctcaagccctttccatacccgttctgctttccggtcgtccgtataaatccggatcgcctcatcatagaacaatggaaatggctcaccctcggttactaacaaatccggaaaagttcgacgggaataggcatcgaatacagcggtaagcaatccctcaaaagtcttgtcgtaaacaaatataatcattatcaatccttcttataaaacaggcgttaatctataaaaggcagtataagctgccgatcgtctactttctttccgctctttctcgtcaatagttgccggacggtttcagggctgacctcattcacggtctgcgtcgggagttcccggcaagtaataaaatagctagcctttttcatgaccactcctattttcttcaactgctctgaaccgagatttgcgtaacgccgggaaacgattatgatctttgccgatttcacgccaattcccggaacccgaagaagcatctcgtaatccgctttattgatatctaccgggaagacctccggatgccgcagggcccaagccaacttcgggtccacgtctagatccagatccggatatgcgtcattgacaatctcatctaccttgaattgataaaaacgcaataaccaatccgcttgatataaacgattctcacggaccagcggaggcgtggtaagtgccggaagacggttatcatacgcatttaccggaatgaatcccgaatagtaaacacgcttcatcgtaggtctctgatataaggccgatgatagacgaagtatatccttgtcggtatccgccgtagcgccaacgatcatctgcgtgctttgcccggcgggagcgaatcgcggggcataccggaaacgcttgcgttcctcggcactttgtaatacaccttgttggatataacgcataggggcaaatacgcttttaaaatccttttccggagctagagtccgcaagctcgcctcattcgggatctctatattcacgcttaaacgatcggcgtaaagcccagcctcatttaccaattcttggctggctccggggatactcttcatatgtatgtatccattgaagtgatgcacgaggcgcaaatccttgatggctctcaccaaccgttccatcgtataatctgggtttcgaaccacgccggagcttaaaaacaatccttcaatgtaattacgtcggtaaaactcgatcgtgagattcaccaactcggtaacggaaagcgtagctctcggtaaatcattacttcgccggttgatgcagtaggcgcaatcatacatacaataattcgtcagcatgatctttaaaagcgagatacaccgtccgtcctcagcgaaactatggcaaataccccatcccgcggcacttcctatagccccgctcttatgcgaacgggaggttccgctggaagcgcaggatacgtcatattttgccgactcggccaagattttcaatttctcgagcactttctcgtccataatttcaccgatatgtttcgtacaaagataatgatctcatgggaaaaagtccctcgccgctccggtttttgaaaggattcttctttcaggtcaacgcttttcccgtgaataaacctatatttgcggaatgcttagaacattcaaatcatagcgaatatgcctacatataatctttatatcaaggaagaagaacttaaaaacaaagttgctcacgactactttcccgattacgactgcacgcaaatcatagggaacatcgatatttgcatagctataccacaggaggaagacgagctagcgttcgagaccgagtccttgttgtgggcggaggccaagaacggcaacaagaaagacatctatgagtcattcgtacagctcatcctgaccataggaaaggcacgcacgttcgatgattacctgcccccgaaattcatcggcgctttcgacgccgagaaaatcgctttcctgccctacaacaacatcatcgacatattctaccagaacgacttcaactggaacgttaccccgagcgaccacgacacgaaggagttccggcaattgtacgaaaaagtcagaggcgacatcgagcgagggatgctgccgttccgcttcggcgcagacgacaaggaactccgctctttcatcaagaagaatttcctccttgggcggaaaggcgtgtctgccatacgcatcaacaagaacaacttcacgcatatctaccaaaagtggctttccgaggtgaagcctactatcgccatagactgggatatcgccaagaaagaagggctgatagatgcggatttctatctggctgacatactgagtgagcatgacatatcgctgagggagaaactgttcgtcttgttgcgagaagaccgttatgtgtataacatccagcggaaaatgaccggggcgatgagtttcgagtcggtggatttcaacgacaaccaagtgtcgcacactcaattctggaatcgctatgaccgtccgccgcgccgtgagtattgggattacatagtcgcacgccgcgacctgctcgtcccacaagacgtgcgcgagcgcaaaggttcgttcttcacgccgaagcgatgggtggagctttcacagcaataccttgcggccgagctaggtgaggattggcaggacgagtattacgtgtgggattgtgccgcaggtacgggcaacttgctgaacgggctgaccaacaaatacaacctgtgggcctcaacgctcgatgcccaagacgtgaaagcgatgcacgacctgatcggggcgaataagctgaacctgctggagaggcacgtcttccagttcgatttcctaaacgactccttcgacaagctgccgaagcccctgcgagagatcatcaacgatgaggaaaggcggaagaagttggtaatctacatcaacccgccgtatgcggaagcggcgacagtcagacaaaagaccggaacgggaaccaacaaggcgaacgtagcccgaaataattcagtttacagcaaatacaagacattaatgggtggggctgttaacgagttgtttgcccaattctttatccggatttataacgaaatcccttcttcggtgcttgcagaattttcaactttgaaaattctgcaagcaccgaacttccgcgatttccggaacattttccgagcgaagcttggtcggaattttttagtcccggcagatacgtttgacaacgtaaaaggaaagtttcccattggtttcttcatttggcatacggatgagaggaaaaagtttttggatataaatactgatgtatatgacaggcatggacattttatggggcataagggattatacgctccgatagagaaccgtttgctcatggattggctgaaaacaaagcatgacaagaaatccgcaaggatagcctacctgcgtatgttgggctctgatgttcagaacaacaatggtgtcttcttgacaacaactccgtcagagagcgatttgaagcaacgaaaaacctgtgatgtcacggccgcaaacctgtcctcgataaccgtatatttttccgtgcgccattgtattgagtccgaatgggtcaacgaccgagaccagtatcagtatcctgaggcaagttgggaaggagatttagaattccaaagcgactgccttgtctatactcttttccacgggcaaaaccgcattagcgctcttagcggcccgaaccattggcttcccttcaccgaacaggaagtgggcgctcaagagaaattcgccagccatttcatgacagattatatcagcggaaaaaatcgtcccgcaacagaaaccacccccgaccttttcagccaaccgcaggaagcgtcgagggcgaacgccccgctctccttctcgcccgaggccgccgccgtgatgaaggcaggacgggaactttggcagtactatcatgcgcaacccgaggccgaccccaacgccgcatttcacgacatccgcctgcatttccaaggacgcaacgagaaaggaaagatgaacagtggcagcctcgatgagcattatacccggcttatcgccgctttgcggcaaaacctcaagcagctcgccaaaaaaatagagccgaaggtgtacgagcatggctttctgctgagatagaggtcgatgtcgccgcgatccgacttcccgccgtccggaaaggatccggatcgccgcgatctggccttttccctgacggaaacagcctgtttcgccgcgatctttcaactttccggatggaaacaagctatatttcacgaaaaacagctacattcacatcgtcggcaaggaattttgccgcaaaacgattatttacctataaaatttaatataaatatgaaagaaatcggtgaaatttacctaggccgcatgaacaacggcgcgcattacctctacgtgagcgatatccttgctcgtgccgaggccgatacgaacgtgaaaagcaaggccgccgcacaagtcgccgcactgagaacttgcgcggcgcgagaagatgcggacttgaaactctcgcggaaaagcctgctgaccgatgacatcgccgaggcagacgccaaacgcgattccctctacagcggctacaagaaggccgtgcagggattcttgaaccttcccgtcgaggcgatggcgcaagccgcgaaagtattgaaccagcacttgaaggactacggcatcgatcccaagatgcagctcgaccgcgagacgggaatgctcatcaacttcatcgcggacttggaggagaagtacaagacggaagtggagacgttgtcgctcaccccgttcgttgccaacctgaaagcggccaacgagcaggtgcgcacgctgacctccagccggaccgacgagcggacgggtatcacggtgggcgcactcaaggcttcccgcaaggcctcggacgaggcttaccgcacactggtgaagatggtcaacgccctggccttagtggagggcgagacgaattacgccgccttcatcgactacgtgaacacggagatctcgcattacaagcgagaggtgctggggcagaaagcgccggtctccgggactgacaagacaccggagacacccgatgatacacccgaaaaccccggcggcggcggagactccgagtcacccgatgagatttgatgaacgtccaattgttatttcaagcacatgagaaacacgatcagctacggggccttcttggctcctgcccttttattctccgcatgcggaacagggcaaaaagaagtggcagagaagccgctcaatatcattcatatcatgacggatgatcattcgtatcaaactattagcgcttatggacatgcgctaggtaaattggctcctacaccaaatttagatcgtttggctgcggaaggtatgttattcaggcaagcctttgtagagaattctctgtctactcctagccgtgcttgtttgatgaccggtctttacagtcaccaaaacggacaaagacagttaggaaaaggtattgatacgacaaaagtattcttctctgaaatcttacaacagcacggttatcagacaggtcttgtcggtaaatggcatatgcaatgtgagccgaaaggttttgattattatcatgtgttatgggatcaaggagattattataatccggagtttaaaagcaaagaatcgaatggcaagtatgtaaaagaagagggatatgcgacgacccttacgaccgatcacgctatcgagtttttggaagagagggataaggataagcctttctgcctgctggttcaccataaggctccacatcgtaactggatgccggatacgaaatatatggatttatatgaggatgtagagttcccatatccagatactttcaatgataattatgccactcgttgcgatgccgcacgtacacaagagatgagtatagacaaaaatatgactttggtttatgatttgaaggtagatgagcttaaagataaggaggcttataaaaaggaatggaatattgatggttggcaggcctctttggatcgtatgaccccggaacaacgggaggcttggatcgcttcttataagccccgcaacgaaaaattcattaacgagaacctgaaaggcgaggatttggttaaatggaaatatcaacgttatatcaaggattacgtacgttgcatcaaatctattgatgatgaagtggggcgtttgatcgcctatttggaaaaagaagggcttatggataataccgtgatcgtttatacctcggatcaaggtttttacatgggtgaacatggctggttcgacaaacgtttcatgtatgaggaatctttccgtacgccgttgattatccgttatcctgctaaaatcaaggcgggaagtgaatgtacagccttagtacagaacattgactatgccccgacttatctggatatagccggtatcgagaaacctgattatatggtaggaacttctttagtccccttgtttggaggcgagacaccaagagattggcgtgagtatctatattatcattattatgattatcctgcgatccatatggtacgtcgccacgatggcgtacgtgacagtcgttataaattgattcatttctatggagagaagaatgaacataatgacgcgattaattgcaatgagctttacgatttgcaaagtgatccgaatgagctgaataatttatacgataatccggaatatgctgatatccaaactcgcctgcaagcacgtttggataagttccgtgtagaccagaaagttgacgaatattaaggtgctaactctgtaaaatcatttattttgtgtaagtttggcggatagaaagaatcattcacctaaaatacgatcgtgaaatgaaactcaatttatccgccagatttttaatgctggccctgctttgtggttcttgcgtattgaacacgccaaaggaggagcttgaatacaacggaatgaatacgctacagatatcaaatgtagatgatttgatatctttctaccaatatgcggatgaccgaattcctttaattagcggacaccgaggcggacggggaaaaggttatcctgagaacagtatggaaacctttgaaaataccctctcttatacgcctgccacgttcgagatagatccgaggttaaccaaagatagtgttatcgtccttttccacgatgatacactggagcgtaccagtaatgggatcgggaaagtttctgattacacttgggaagaattgcaaaatttccgtttgaaggatcccgaaggaaatatcacaaactatcgtatcccgactttagaggaagcgattcgttgggcccgtggaaaaacaatcctaatccttgataagaaggatgttccgatggagcgcactgctcagttgattaccgatatgcaagcggaaccttatgtaatgattacggttcatgatggtgcctcggctcgtttcttttacgagaaaaatccgaatttcatgtttgaggcttttgtaaaaacgaaagaggcggttcaagactatgaggataacggtataccttggaatcatatcatggcttacgtaggacctaagattacccccgaagtccgtgaggtgatcgatatgttacatgaaagaggtgtcatgtgcatgatatctaccgctccctccgacgataaactatccacacccgaaagtcgtgctgaagcataccgtatgatcatccgtcaaggcgtggacatcatagagtctgaccgacctatagaggttgctgaagcgatctctagcttgattccggttagcagttccaaaggaaagtttttctctacactataaacataatcaatataagacatgaacaaagaactagaaatgactcccaacgtattagtggagtttttacaaaagccagcgtccgagtttacgaaagaggacattatccgttatatctatgagaaagatatccagatggttaattttatgtatcctgcaggcgacggacgtttgaaaacactaaactttgtaatcaacaatgcggcctatctggatgcgatcttgacttgcggtgagcgtgtggatggctctagtcttttctcgtttatcgaggcgggaagtagtgacctgtatgtggtgccccgtttccgtacggctttcgaggatccgtttgcggaattacctacgcttaccatgctttgctcattcttcaataaggatggagaacccttagaaagttccccggaatataccttgcataaagcttgtaaggcttttcatgaggtgacgggaatggaatttgaggcaatgggtgaattagaatattacgtaatcgcaccggatgaaggcgttttccctgctaccgaccaaaaaggttatcatgaatccgctccttacgctaagttcaatgagttccggacggagtgcatgcactgcatagcgcaagccgggggacaaattaaatatggtcattcagaagttggtaactttacgttaaatggtttgatctatgagcaaaatgagatcgagttcttaccatgtcctgcggaaaatgcagcggatcaattgatgatcgctaaatgggcgatccgcaatctagcgcatgaatatggatataacatcactttcgctccgaaaattacggtgggaaaagcaggttccggtctgcatgtccatatgcgtatcatgaaagatggcaagaatcagatgttagcgaatggtatcttatccgaaaccgcccgtaaggctatcgctggaatgatgtgcttagcttcctctattacggcttttggaaatacgaacccaacctcgtatttccgcttggttccacaccaagaagcacctacgaatatttgttggggagatcggaatcgttcagttttagttcgtgttccgctaggttgggccgcaaaaacggacatgtgtgctttggcgaacccattggaacctgccagccattatgatacgagccaaaagcaaacggtcgagatgcgctcaccggatggctccgctgatttataccaattattggcaggattggcagttgcgtgccgccatggttttgagatcgacgatgctttggagatcgctgagaagacttatgtaaacgtgaatattcataaggaagagaatcaagatcgcctaaagacattggatcaactcccagacagttgcgcagcctcagccgcccgtttaagacaacagcgtgctgtttttgaaaaatataatgtgtttagtccgagtatgatagacggcatcatccataaactggaatcttatgatgacgcttctttacgcaaggacctagagaataatccggaagagatgttgaagctggtcaatacttatttccattgtggctgaaaatcctttttatggtttcacaagagggtgtgtcatgacacaccctttttatgccctgctttcatctcttgaactttccattgtgtttttttgaatatccgagcacaagagagaccataaattaaaacgaaaatattctagagaagaaaaaaaagatataatagtaaaaaaaacatgataaaaaattgttatttacaaataaaggcttacctttgccaacatcaaaacaaaatgatgttataaattcattttgaagttatatgtttttcgagtttaaccttgactgtgagcacaaaagattatcgcgaagatcttttgaacggttggatagagacgtctatttagccgttttttcttttagccctatccaataaagctattcagctatttgacagatacagctttatttgtcacggagattttatatccttttattttatggattacgaaataacatactgcataaaagcggtatgttgtatcgcactattatacagttgagcaatgaattatacatataaacaaatctggctcatcaactttcctgtaatgatgagcatcttaatggaacaattaatcaatattacggatgctgttttcttaggccacgttggagagatagaattaggagcgtccgctatcgccggaatttattatttggcgatttatatgcttggttttggatttagcattgggttgcaagtcatggtagctcgaaggaatggagagcaagattacaaggaaaccggcaagaccttttttcaaggcttatttttccttttgggattggctatctttctttaccttctcattcatacggtttccccatttatattaaagaagctgatcgtttcctcggatatttatcgagcggtaatcctatacttggattggcgtagctttggattgttgttttcattcccatttttggcgatacgttcttttttagtggggataacgcatacaaaagctctatcttgggctgctgccatagcggtattaatcaatattcctttaaatttttatttgatattcactagggaattaggaatctcgggggcggcaattgcctcttctttggcagagatgggctcctttatgatgctttccttctatatgtggatacgattggataaagaaaaatatgggttgaggccggtctataatggtaatttacttataaaagtcttgaagttatcaacatggagtatgcttcatgcgtttattagtgtagccccttggtttttgtttttcgtttcaattgaacatttgggaaaaatagagttagcgatttccaatataacccggagcgtatcggctatattttttgtgatagcgaattcttttgcgcttacaacaggctcattagtcagtaatgcgattggtgcgggagaagggaagacactattttcaatctgtagtaaaattctgaaattaggttatgccataggatttcccttggttgcgattgctttattgtgtaatcgatggattattggtttttatacgagtaatgaactattgatacaattagcttttgccccttttgttgtaatgttgttgaattacactttcgctttaccgggttatgtatatttgaatgctgtcggaggaacaggaaagacacaaatgactttcctttttcaagttacgacaacagccatatatttggtttatctttattggttatgtcgctacacgcaagctcctctcgcaatctatttaacagcggaatacgtctttgtaattctgttggctacacaatctattttttaaatcaaaaagaaacattactaaaaaacgaaaaaagatgatgactaaaatatatccacgtacgggaaataaacaaaccgtatatctaaataccattatacaagatcctcaaatagtgggattggcctatagacaagattcgccagtgtttaccatacattatgaatggtgatttagatgagttattatctattgaggatgacatatttttcttgttgctattttaggaactggtaagaagtaaaaaccttattatgacgttctcccaactcatttaccatttgctcggcttcttcttgggaaatcaaaccctgttccttgaattgttctatcctctttttttcgttgctcaataacatacggacagacttgcgagtcacagcctctttatatgatttaggataatcaatggatatttttgtgataaaattcgatgctctagttatatttttacggatctcgacttgtaaaagcgacaagcaactttcatattcggtagagactgtttccgaggagccaaactcgttaaccagtttcaaggactctttctgggctatgatcaatccccttgccaaatcgtaccctaaaataattctgtcttgatagtaaatatctgcccatttttggaaaaaacgagagaaaaacttcatactgattatccatgaaggttcctcacagaattcaaaaatatcgcctcggtcgcatagaggtttctttccgtctcgatcgtattgttcatcaattgcggcatttaaacgtctttgcgtcccggatgaaatgacaccgtttgtgtataggctccaatagagcgagcgctctctatccaagattcgtagacgtatgtctgccattacgtctttggtacggacaggcatttccggatatatttctttttgaggtaggaactgttcgacaatactccagtctgttgcttccaacgcttccttctgtttcaaatcttttaggtatttttcagaaccttcgtacaactgcttttttacgctataatccaaaagaagcttggaggacggtatctctgccaatcccaatttctttagaagccaaccgattgtagtcgcatttattgtcaatgttaaagttacaatcccagccgtaaggaaaagtacttgccgacgtattggttctggtatcgaaaaggtatacgataccatcagtgccatcgttagtcccaatgcaccacgtaatcctccccaactcaagatcgtggactctcgcaccgacaagccatatccggaccgtttcatgatcggataaaatatggttattattaatatacgaatgatatttatcccggcatatacacagataagaatcaataaatccatccatgagaagtctaccttcaatgctattacgatacctacaattatgaatatcaatgtatttgctatgtgtgccgccaattcccaaaattgacgcatgaatttattgacctgcggtttcaacctcagacggcccatgtaagagactgccaaaccgaaaccgaccaaagcgattactcccgatacttccaaataattttgcgctatgacaaaagtcatataagcggaaagaatcatcacgctgttttgaagcatctcgtctccatttacttttgtgataaattgaatacacaaataagccaaaagcgtaccaaccagggctcctccggcaacgaccatgataaagtccgctacgggagaatccgaaacaccagtagcggtataggctccgaaaaacagcatgaaaaggacaataccggttccatcgtttagcatcgactcggcatccactagcgtcgagaaacgtttactggtgcctagctctttcaacaatgcaacaacggccactgggtctgtcgcacttatcaaggctccgaacatcaatgcaaatgtccagttccacccttcataagaaggggcgaacgttccgatccctatcatcaaggcagccgtcagcaacatcgcaataatgacacccggtacggacaatatagtggcatttgtcaatgtttttcgaaagatatgcacgtccagttcataagcagcgtcgaatatcaagatcggaagaaaaatataaagtatcatatcgggattagcatttccggcaaaatcgatcgatgattttaatataggaatgctttccaaccagcctatccggtcaaacgtaccgatcaataatccaaaggcaaatagcccgaccgtgtaaggaagaggcatcttttttaatccgaattttaaaatcgcacctcccatcaaccttatcaatacaaaaaataatggggccagtaaattattcgtttccatattgattcactatttaactgcaaggagctggcaatttttgagccaatagcgttcgaagatatataattatttaataatgagatatctatgagctttgtcctataaaaagagaataaaatctctttcatagtgaaaaaatatttccaaaatgaaagagatacagaaggtttatttaaaaaacagtcgtatgtcctcttccgaaaacaatatagcggtattgactagtgccaaatgggaatatgcttgaggaaaattccccagttgctccttggtttcaaaatcaatgtcttcactgaaaagtcccaagtgatttgaattatgaagcatttcctcaaacagactacgtgcttcttctttttctcctatgacataaagagcacgaatgagccagaacgtacaaatagtaaaggcggaagagggaagtccgaaatcatcatgagatttataacggtacatcaaccctttgtaaagtaacgcattctttatcgcttgcactgttttatggtagcgtatgtctctcggatcgataaatccgtacggttccattaacaacaaggacgcatcaaggtcggaattaccgtaggcttgcgagaaactttgcatctcttctttccaaccgtttttcatgacattttctttgattacggccgcttcttccgaccaacgtctccggtatgtcggtttgtttaataaatctgcaatacgagctcccctgtctaatgcgacccagcacataactttggaggaaacaaaatgctgtccttctcctctaatctcccaaatgcctttgtctggttttttccagtcaatcatcacattcgtcaggatactttttaccatttcccacatatcttccacctcgtccaatgtaccgggcatcaaacgatagtattggtagatcaggtccattaaatagccgaacgagtcattttgaagctggtggtaagcatcattaccgatccgaacgggtcgtgagttcttataaccggaaagatgtcccagaataacttccgtcaattttctttctccgcgaataccgtacatgatctggtaagtatcgtgttgagaaacaaaagtagactggacaaatctcatgaaccgccttgcggcttcgacatggcctatctggaacaaagtttcaatggacatggaggcgtcgcgcagccaacaaaaacgataatcccagttacggacttctccgatcgtttccggtaggctagttgttatggccgccaatacggctccattataaaaagacatcaattttaaaactaggagacttcgctcaatgacatcgttatagaccgtaaacttcttggttcggtcagtccaatttagccaataaaccagcgtccggcagtattccagtttctcacgctcaatgttgacgggtattactttctcgttatatgaaagtagcaagaactcgtccttagccagtatgatttctttctgttccaagatcttgtgcaaaggtagtgaggaataaagatattgcctatctttgctgttagaagtagagtaggtctctatatattccgaggtcgtgttgaaaattgtctttccacgggcatagtccggagccggctcatagttgattttaaaacggggagtacctttgattctgcggatatatcggtagatctctgccggacgataacaattgctcgcatcgctcagatggtaacaaggcatgaaatctacaacggcaaattcattttcttctgatacgaagttggtcgaaagaatatttgtatgaggaacatacgattgcgatatttgataatccggagaaacctcgaagccgaaatatccccctttctcccgatcgagcaatgacgcaaagatggaaggtgagtcgaagttagggaaacataaccaatctatactgcctttatccgaaatcaaagccgctgtgcagcaatttcctattactccgtaatttaacttgtccataaaaattattttttatttgtccacaatcctttaaaaaaatcaacggtggctttcagttgaccttttatgcttctggaagtcgttccgtaactaacaccttcacccgacagttcttccaaaaaaggcaatacttcttcctgcgaggacagattgtatttggctttttcagatacaattccaactttaactgttatggcggatactggaagagcccggaacatatcctcatccgtcgtgtcatctcccattgctagtataaaatcatagcgggaagccaataataggcgatctacttccgaaccttttgtgtattctggagattttatttccacgactttgttgccctgcatgatttgtaatccctttctcaggcaaacaggcattatagcctttgttagctgttgcgctctcagctctcccagccaggcgtccgattctctataatgccaggcaagagcagcttcttttgtctcaagatgagagtacggggttttgcttacaaacaaatttagaataaacaatagctccgaatcccactctcgattgcctatgtttttatgccatgcgcctttttccttgtaaaatgcaccatgctcggcggcaaaagacagaggaagatctcccagccatttctccaatgtatagtggtcccgcccgctattaatggttacatgattccgagagtcggaacaaaaacgctgtaacaggtctcgtaatgcaggtgttggagctgcatcttccggatgatttttgaatgcagttaatgttccgtcgtaatccagcaaaatcaagcgctttttcgcttggtcatataatgttttgatttcgttctggtcttgtgcggagatctttttcttttgtaatcgtttgtttttctctgcggcctgccgccattctctcatgaaatccgcagcccatttgtttacggtttgaaccgaaaggatggcttgcattcgctgaagcctttctctttgttcctccaatggcattttcaatgcacggcaaatggcttgttcgatctggtccgtgtcgtttggattaatcaataaagcatcagacaattcaaccgaagcaccggccatttcacttaaaatgagtacccccggattatcttgtttggtagcgacatactcttttgccacaagattcataccatcgcgcaaaggggttaccaaggctatatcggcaacataatacatcgctaccaattcctcaaaagagaaaccgtgataaaaataacataccggagtccaattcatggtagagtaagttccattgatagaaccgatctcctcgtctattttggttttcaattcggcataactgcctacatggtcgcgagaggggacgataaccatcgccaatgtcactttcccgtgatattccggatgatttttcaaaaaagaggcgaatccgtaaagacggtgcaatattcctttgctgtaatccagtcggtctaccgatatgattaacttatgatctccaaatagaagtcgtgttttctctactgcgtggtggactttgtcatcagctatcacattgtgataaagatcatagtttatccccatcggtaatgcatccacacgggttacacgatcattcatttgaacttcatccagattgaaattcttatgaaggatgcgttccgtcgcactgatgaaatgacgcatataatcgtgaatgtgaaaagcgacaaagtcggctcccaaaagtccgttcaggatctcgaccctttcgggcagaatccggaaaagttcatgtgaagggaacggaatatggtggaaatacccgatatgaaggttgggaaacttctcacggagcatgcccggcaacagcattaactgatagtcctgtacccaaacccaatcattaggttcaactatccgagatatctcttcacaaaaaacagcattgacttccctatatgattcccaaaagttctttttatataacgtataagcaaaaaagtaatgacagaggggccatagggtactgttgctatatccttcgtagtaattttcatactgcctgtcggataagaataccggatgataattatttttttccaattgactgcaaatgtcatctttttccgtcttttgttctacgcagacgccaggccaaccaatccaatgtttttcacaatcaacgtccaatgacttcaaacctgtagccagccctccttcgctccgtgaaaaaacaaattttccatcggaggaacgtgtaacttttacaggcaacctattcgaaatgataaataatctcatatttgaaatattatatacaacacaaagcaaaatccataccaatttgtatttgtcattgataaacagatgtttgcaaatagggaagcctaagtaatattaccaaaatgaaaaacactttttcattttagttgttttttttactttcaatttagaattaatatttttaatcaattgatatatagtgatttatgtttgttgttttctaattggtctgattttggcattatctttatcagtttagatttccgaagaaagtatcattaatattcatcttcggttgtctgctataagaaacaatgtagaacaacaaagaaacaaaatggtattttttatttatcagttaggctcgcttgcctctgtatgggcaatcagcaatttaataaaaaaagatgttcctcaaaggatcaaaaacaagattatcgttctgttactagtaacaagctggattggtgttttggggtattttttcattttgaaaaacaggattgaaaaatggtggccttgcaagaagtacttggttgctcatagaaggatatgagtttcatattatatattattgcaattaaagttgttttatgtgtaccaaaatctttttctccattcattctgtaaagatttgaattgtttttttctttttgagccgtggatataatttattcacggcttatttaaaggatttgatttcaaaaattaggatacaaatggaaaagaatatgcggatgaaatttttaaagcaacggataacggtaatattactgttagtggctagcgtatgtatatgtggtagcatcaatgaattctatgtcttcgaaaatgattattattttaaatatctgctgaatacttttacaggaatcatccttttgacaggaattgcctatttatgctatcctcaaaagaagacaaatcaggaaaatgaattggtgctgaatgaatacaaactggtgtatgaaacggagtctaccgcatcgcaatattttatttctgatacagaagcttggaacacattaagaaaacaattgaaaacaacagctcaaggacatgctattttatatatcagcgaaagttgcgaattgcctataatcaataacatgattttagctaaaaagagaaatttcgattgttggaagcctgcctgtgcagggcagatatctaaagattttggtgagatttaaagtgatcataaaaaatatatggcagccataaaacgatgtccatggaaaggaaatgtcaattatctgaaaatacggggaataatattgaattggacctagtcagcgttgaaaagcaccacattcagaaagttctccaacatactaacggatacaaacccgaagctgctcgtcctcttgggatagccttaaccacactttataggaagatggaagcctatggactataatgtggaacactttgttcttgcatacccggtaggtttacctaaaacaggcagcttgccttttttatataccttttcaaaatgaaaatatctttttccttttgaaaaggattgagcatattacataataatattattttttgattatatagctgataaacaatgcattgtgcaagaactcgattttttggcacagctttggcatatagtagggtggaaaacaaataaatagtattaacaattaaaaaagacaagtatggaagatacgttatcatttttgttcttgtgtgctaccggtgtagcatgctattggtttttcttcaagtgtgtggactggtttgagaaaatttaatgtaagaaaggagaattaaattatgtttttagcactgtttatactttgcttattgatcttcgggtatttgatgtatgtcctaattaagcccgaaaagttttaatggtaattagtttttttaagtgaaaagatgaatacagaaattttaggtgtagcattgcagatattgctgctgctggttatcagttacccgctgggaaagcatatcgccaaggtgtataaggagggaaacgactgcatgcgtttcatggctccaattgaaagatttatttacaagctggcgggtatcaaccccaatgaagagatggattggaaggcattcttgaaatctctgcttattataaacgtattttggttcttctggggtatgatcctgttggtatcgcaaggatatcttcctttgaatcctgatgggaacagcggacaaagtccagatttggcgttcaacacgtgtattagtttcatggttaactgtaacttgcagcactatagcggagaaagcggtttgacttattttacacagttgttcgtcatcatgttgttccagttcatcactgctgcaacaggtatggctgccatggctggaattatgaagtcgatggccgccaaaacaactaaaacaatcggcaacttctggcactatttagtgatcagctgtacacgtatccttttcccgatgtctctgatcgtgggtttcatcctgatcatacaaggtacgccgatgggctttgactccaaaatgacaatcccgacattggaaggagctgaacaaactgtttcacaaggtcctacagctgcaatcgttccgattaaacagttaggtacgaatggtggtggttacttcggagtaaactcttctcacccattggaaaacccgacttacctgaccaatattgtagaatgttggtctattctgatcattccgatggcattggtatttgctttgggattttatctgaaacgtaaaaagttaggttatgtgatctatggtgtgatgctgtttgcttatcttttgggggtattctgtaacgttcactatgagatggcaggtaacccgaaaatcgacgagatgggtattgaccagtcttgcggtgctatggaaggtaaggaaacccgtctgggtccgggcgcaaccgctttgtggtctgtgactacgaccgtcacctctaatggttccgttaacggtatgcacgacagtacaatgcctctttctggtatggtggagatgttgaacatgcagatcaatacatggtttggtggtgtcggcgtaggtttcatgaactactatgcattcttgattatagccgtattcatcagcggtttgatggtcggacgtacgccggaattcttaggtaaaaaggtagaagcccgagaaatgaagattgcaacgatcgtttcgttggctcacccattcgtgattttgatctttacggctatctcttcctacgtatgggtatatgcccctgaattcgtagagagcgagggtggctggttgaacaaccctggtttccatggtttcagtgaaatgttatatgaatatacttcttcttctgctaacaacggttccggttttgaaggattaggcgacaatacctatttctggaactacacttgcggtttggcactgatcatttcacgttatttgccaattgtcggacaggtagctattgcaggtcttttggcaaacaagaagtacactccggagagtgcgggtacattaaagactgatacggttacattcggtgtgatgacattcttcgtaatcgtcatcgttgctgccttgtcattcttcccggcacaaacattaggcccgatcgccgaatattttagtatttactaattgacagattaagaagatgagaaataacaaaactgcttctttatttccaaagaagctcgttatagaaagtttgaagcaatcattcattaagttgaatccgcggatgatgttccgtaacccgatcatgtttatcgtggaggtggtgacattcgtcatgttgtttgttacgatttgggcggctaccaccggtgatacgacacaaggatctttcggttacaatatcttagtgtttattgtattgttcgccacgttgcttttcgccaacttcgcagaggcgattgcagaggcacgaggcaaggcacaggccgacagtttgcgtaagacccgggaagaaactcctgccaaattgtgtgtcggtaacaagattgaaacggtcagttcttctcagttgaagaaaggcgacatctttatttgtgaagccggcgacacgattccttccgatggtgaaattatcgaaggtctggcttctatcgatgaaagcgccatcacaggtgaatctgctccggtgatccgtgaagcgggtggagacaagagttctgtaacaggcggtacgaaagtattgtccgaccagatcaaggtgaaagtgacgaccgaaccgggtgaaagtttcttggataagatgatcgccttggtggaaggcgcttctcgccagaaaactccgaacgaaatcgccttgacaatcttgctggcaggttttacattggtattcgttgttgtttgcggtaccttgaaaccgtttgctgattattccaacacgacgattacgatcgcggcctttatctctttgttcgtttgtttgatcccgactacgatcggtggtttgttatctgccatcggtattgccggtatggatcgtgcgttgtctgctaatgtgatcaccaaatccggtaaggcggttgaaacagccggtgacattgatactttgctgctcgacaagaccggtacgatcacgatcggtaaccgtaaagcaacccagttctatccggtatccggcattgacgaacactcttttgtacaagcttgtctactgtcctctctttcagacgatacacccgaaggtaagtcaatcgtggaattgggacgtgaaaaaggtgtacgtgtacatgatctgaatacatccggatcaaagatgatcaagtttacggcagaaactaaatgttcaggagtggatttggcaaacggtactcgcatccgtaaaggagcttttgatgctattcgtaagatgagtgaggctgccggcaacaaatatccgaaagaggtggccgatttggttcagaagatcacgagtaacggcggtactccgctggttgtttcacaggatgatttcatcattggtgtgatcgagttacaggatatcatcaaaccgggtatccaagaacgttttgaacgtttgcgtaagatgggtgtgaagacggtaatggtaaccggtgataacccgttgaccgcaaaatatatcgctgaaaaagccggtgtagacgattatatcgccgaagccaaaccggaagacaagatgaactatatccgtaaggaacaggaaaacggtaagctggtcgccatgatgggggacggtacgaacgatgccccggccttggctcaggcaaacgttggtgtcgcaatgaacagtggtacgcaggctgccaaggaagctggtaatatggttgatttggacaacgacccaacgaaactgatcgagattgtcgaaatcggtaaacagttgctgatgactcgcggtacgctgactactttcagtatcgctaacgacgtggccaagtatttcgctatcgtaccagctctgttcatggttacgatcccggcattggccccgatgaacatcatgcacctgcacagtccggaatcagcgatcctaagtgcgatcatctttaatgcgatcatcatcccgattctgatccctctggcattacgtggtgtggcttataaaccgatcggtgcttccgcattgcttcgtcgcaacttgctgatctacggtttgggcggtgtaattgccccgttcattggtatcaagttgatagatatgattgtaagtttattcatgtaaaagtaaaatcaatattaaaaaccttcctccctctgtatgaagataggaggaaggttaagaaaataaaacaataattcattatgatatcaaatctttttaaatcattaagactgacaattgcattttgtttgttcttcagtgttttctacatcttcgttttgtggttgtttgcccaagtggcaggaccgaataaaggtaatgctgaactggttacattgaatggaaaagtagtgggggccgccaacgttggtcagaatttcacgcaagatatttatttctggggacgtccttcccatgctggtgatggttacgatgcatccagttcggcaggtagtaacaagggaccttccaatgaagaacatttagctttgttggaagaacgtattgatacattcttggttcatcatccttacctaacccgtgaaaaagttccggctgaaatcatcacagccagcagttccggtttggatccccatatctcaccgaaagcggcttatgtacaggccaaacgtgtagcggacgctcgtggatggtcggaagaaaaggtcatgggtatcgtcaattctcatgttgagaaaccgttattgggtatgttcggaacggagaaagtaaatgtattgaaattaaatgttgcgcttgatcaagcatcaaataacaaataacaaattttaataagtcaattagatttaggttatgaaatcattcgtaaaaaaagtagcagccttggcaattgtattctcaatggcatcttctacgttggctaatgcacaggaagaggatggtaaagtaagtttttctgtgcagggagatttggtaagttcctatatttggcgtggtttctaccagactggtgctagcttccagccgacactatcactgggggtaggtaatttctctttgacagcctggggatctaccgattttcagggagcaaactctacatctatgcctgcggctaaagagatagatttaacggcagcgtatacattcggatcagctggtcctacattatctgtcgctagcttatggtgggcagggcaaggctcttgccgttattttaacttcaaaagccatgaaacagatcaccattttgaagcaggtttggcttacactttgcctattgagaagttacctttgtctatcgcctggaatttcatgtttgccggtcaagacaaagatgaaaatggaaaccaaaactattcttcttatgtggagttgaattttccattcacagtgaagggcgtcgatctgaatgcaacttgtggtgttcttccgtatgatgcgggaataactacgtatggaggtgatgtaaatagtggatttgcagtaacgaatgttgcattgaaagcaacgaaagatatcaaaatcacggattctttctcattacctatttttacacaggcaatttggaaccctcgcatggaggatgcccatcttgtcttgggaatttctttaagaccttgatataataatacgcatggaccgagaacaaagtgtacaacattttttagatttgttgaaaaagtctcgtcgtggcaattttaaaatctacatcggcatgattgccggtgtaggtaaatcgtatcggatgctatcagatgcccaccaattactggaaagcggtatcgatgtcaagatcggttatatagaaacacatgggcgagtcgagacggaggcattggtggaaggattgcctatcatcccccgccgcaagatattttataaaggaaaagagatcgaagagatggacttgcagtcgattctcagtatccatcctgaagttgtcatcgttgacgaattggctcataccaatgtcgaaggcagtaagaacgaaaagcgttggcaggatgtcatggatatactggatgccggtatcagtgtgatcacggcggtcaatattcagcatatagaaggacttaacgagatggtgcaggacgtggttggcattgaggtcaaggaacgtattcctgatatcgtactggagcaggctgatgaagtggtcaacatagaccttactgctgacgaactgctggctcggttaaaagccggaaaaatatacaaacccgataagatacaaacagcattaaataatttctttaaggctgaacatattcttcagcttagggagttggcattgaaagaggtagctttgcgggtagaaaaaaaagtggagaataccattccagagaatctcggcgtacgccacgaaaggtttatggcctgcatcagcagtaatgagaaaactccccgtaagatcatacggaaagtcgcacggttggcaacccgatataattccaagttttttgtactgtatgtacaaaccccaagagaaagttccgacaggattccgttggcaagtcaaaggcatttgcttaaccatttcaagttggcaacggaacttggaggagaaatcattcaagtgcaatccccacatataacggatgcgatcgtacaggcttgtaaagaaaagcaaatcagtacgctatgtatcggacgaccagctttaaaatatccttccgctatccttgcgatggtccactatcggaacatgttagaagagttggctcaattaggcattgatttaataatattagcataaaaatccttccatgaatatgaatataaaaacaaagttgacttatgggataggacttttatttgtcctgatcactttattaggtggattggctataaaaaacattcataatgtatcggatgacacgcagaatatcctagcggataattataattcactcctttattcccgtcagatgctcgagtcactggatgccattcgggaaaatccgaatgctcgaaaagagtttgaggccgggttggaagctcagaaaaaaaatctgacagagaaggatgaagacgtactaaccaaccgattaagttcgaactgtgaaaaggcgttggatgacatggatgatgaatcgattcggcagatacgccagacgatttataccattatggcagtcaatatgtctgccatttatgaaaagaatgaagtggctgtccgtacggcggaaaggtctctcttttggatctggacggtaggaattgcttgtatcgtgatcgccttcctctttctggctcgcctgccacgctcggtcagcgtacagatccagaaattgacggatggcatcaaggaaatcaccaatgccaattacagcaaacggctcaatttgggcaatgaaccggagtttaaggaaatagccacgttgttcaacgagatggccgagcgcttggccgaatacaggaacagttcgctggaagatatcctgcaagggaaaaaatatatagaaacaattatcaacagcattgcagaacctatcataggcttgagtaaggaacggaagattttgtttgtcaatgacgaggctttgactgttttgaatttgacacgggaaaacattatcgacaaaccggctcccgaagtggcgttaaaaaatgatctgctgcgccgtttgatccgccagttggtacatcccgatgacaataaggatccgttgaaaatctacgcagacaacaaggaaagctattttcaagtaaaatacatcccgatcaacgttaacaggcagactggactggagagtaagtatgtcggggatgtgatcctgttgaagaacgtgaccgaatttaaagaaaaagatattgcaaagacaacctttatttcaacgatctctcatgaactgaagacaccgatatctgctatcatgatgagtttggaactgctggaagacaatcggatcggaaaactgaatacagaacaggagagcctttccaagaacataaaggaaaatagtgaccgtttgttggagatcactggcgaattgttgaagatgtcacaggtagaaagcggtaagctctacctgaatccgaagattaccaaaccgatcgaactgatcgactatgccatcaaggcgaaccgggtacaggccgagcgttttaactgtcagatcgaagtggagtatcctgaaaagatcaccaaattgtttgtcgacagcgagaaaattgcttgggttgtgaccaacctgttatcgaacgccatccgttattcgtcggagaacggacggattatcatcggtgcacgacagatcgacaaagccgtcgagatctatgtcaaggacttcggaaagggcattgactcgcgttaccacgaaagtattttcgaccactatttccgtgtgccgggaacaaaagtacaaggtagcggtttgggacttgccatcagcaaggactttgtggaagctcatggtggtacgatccgtatcgaaagcgaagtcggtaaaggtagcacgttcgtgatcagattcaatgtataaaaagtaaaatcaaaaatcagatagtctaatgaaagtattaaaatttggtggtacttcagtcggttctgcccagcggatcaagaatgtcgcatcaatcatttgcgatcaggaacagaaaatagtagtactctctgccatggcagggacaacaaactctttagtggagatatctgagtgcttccataagaaagatccggaaaaagccaatgcggtcctttcttccttggagcaggcttatgtcaatcatatagaagaattataccggagcgatgtctacaaggaaaaagccatgcaatacatgctcgaacggtctcaacatgtctggtctttctctaatatgcctttcagcatgttcgatgaaaaggaaatcttggcgcagggtgagctaatatcaacctttctgatgacctgctatctggaagaacaaggagtgaaggtagttttattgcctgcgttgaacttcatgcggattacaatggacaatgaaccggacatggaatatatcgctaaacacctaaatacacttttggagcaaaacaaagaggcagaaatatatattacgcaaggtttcatctgccggaatgcttacggcagcattgacaacttggaaagaggaggaagcgattacaccgcctctctaattggggcggctatccaagcagaagagatacagatatggacggatattgatgggatgcacaacaacgatccacggtttgtcaatgacaccgctcctgttaggcagttgaacttcgacgaagccgctaagttggcacatttcggtgccaagatactacatccgacttgcatcctgcctgccaaggaaaagaacataccggtacgtctcttgaacgcattgcagccaagtgcgtcgggtacattgatctcgaacacggcggaaaagggtgcgatcaaagctgttgccgccaaagacaacatcacgtatgtcaagatcaagtcgctccatatgataccgacacctcattttctgagcatcgtgtttgatacgttctataattacaatacgccggtgaacatggtgaccacttccgatatcggggtttccgtaacgattgatgatgacaagcatatagacgagattgtgggtgtattacggaaatacgcaacgattacagtcgaaaagaatatggtgattgtttgtgttgttggtgacctggaatggcaaaatgtcggttttgaggcacgcatcatcaatgcattgaaagatattcccgtacggatgatttcatacggcggaagtagtagtaatgtatcgttggtgatgaaagcggaagataaagtgcatgctttgaaggcgcttagtgagcacttgttttccgtatcagacaaacctgtgttatcatccgtttcttaaaagaaaattaagattaatagttgagcatatttgttttttgatttgttttagaaatgaagcagaagcagtctttttttgtagagactgcttctatttttcggtaataaacaatgaaaattcttctgtgtattgacaggtggaaaatctggtataaactgtccccccattatcctatctaaagagtcccccaaaatccaatttaaattgccccaccccaaaaaacattaaaagagttacagaatcagttcataattctacattaatctattaaatagacaaaacagatagtattcccaataaatcaatcagcatgaacaagatttgtcaaggaggcgtgcgacttgtttgtcatgggaagctccggtacaggaaagagctacattaccacagccttgggatacagagtctgccagaaaggattgaaagtgctgtatgccaatacttccagacttttagggcagttgaaggccaccaaggtaaaaggtagcatcctgtaggagctgaaaaagatagaaaggacggatatgcttatacaggatgatttcggcttgcagccgttggacaacggaagcagaatgcatctgatggacatcatcaaagaccgatatggtaagaaatcaacactgattacatcacaattgccggtcaaagacaggtatgatgtcatcggcaagaagacaatagccggcgtagtcatggacagaataactcaccaagccgcaagaattgagctgcacggagagtccatacgcaaaatttgcgggaagaaatgaatgattatattggcagtaaataaaaattataaacccagcacaaatcgaaaactaataaactgattatgtgatatttttttgtattttaggaaaaataaatcgggggtcaatttaagttggatattggggatctgtttcattggagtttccaagttgtcgttatactccttgaacacattgtataatgttttgaaagtttcgtccttttcctgatagcggtttactatggcacgtgcggagacaatcttttcctccaattccaagtcttggtaaatctgatagaatttcacacgcaaaggtactttcccgtttttaacggtttactacgcttgatgaagaacaacacgctgaatatttctctttccatacggctcaatttttaatgatacaaaattaggaaatcgaaccgagaacctggttatgtaaaatagatcaacgtgctgtaaaaaaacgaagtagcacttgtgttgtgtaacattttaggctttctaaaaccgtcccccgaataaggacgtgccgtctgcttcaatcccacttattttgcctattcttggaaatgaaaaatccctgaacttgtttgaaattcagggatttacatcgtttttcttttcttaaaagtggtgccaccaggaatcgaaccttttgcttcggtttattctaactccttgagtgactgcacattttttgctttatcttttatgaaaaccattgaattggccttacgctaaattcattgtttttctttactaatctgacaaaatttgtctctttgacactgcaaatataatacacaggttcgatttctgcaaatattttcattccttttaattatagttttcaacaagagaaaaaaataaaaacatgtgctaaatcaaatgcattaagaatttatttattgtttggggtgttgactttaaagttggaaattttgcttcgcaaatcattagaaagatataccccttgaatctttattttgcatgaataaaccaaaagcactaaaagagcaaaaatacaaatgacgactatttcactaggcgccaaaaagtttggaactgacttgggcatgaaggcacctgcaaagagatctactaaacataagattatagctcccacctttcctaaagcactctttacctttcttgatttttgtatctctatatcgcttacaatttgtgcaatcacagtattattggttttcattgcatattctttcaacgtaaatatcgaaacttcttcattattaaatagaaaaatatatttcccaattaagggtactgctagtgtacataatgcaaagaggatacaagtaaaaaatttcacagtccaaatacagacaatacctaatattacgaatggaatcaggtttattagagttaaatcctgaaacgtaattccaggttctttttggggacaacacacacctaaatacaaatctgtaaacaccaatagaataaggaaatttgtccatatatccgtatcataaatcttgtggttgtcaaataacgcaatcaaatctttcatgttgttcataaatacttttttaaattaatagtttatagtaaagcggcagtcaacattttaaatttccactgtattaaaatagagcctatactgaaaaggaacagggctattggttatcaataccctaaaaccttattcgatataatgtctacagattataccattcaaatatattatgtgttattggattttacaaatatacagatactattcagaatgtcataacttctccataaatattattttgtacagtttttttacttataattcatgcctttatcatactttgcggcattgctgcatgaaggaggtgtgcatgccaaaacagaaaagtttttgagccattcatgtaaaaaggatatacaggatgtcatctgatgacttttaatgacatctgatgacactgctttttatgtttcggatataaagcggttctttgtcgtgtattaatagtgaactaatccatgaaaatgagatgccatgaacatacaagaagcaaagaacatcaggcttgttgattttttagccggattcggatacaagccggtaatacagcgtgggaacagcgtatggtacaaatcgcccttcaggacggaaaaggaagcctctttcaaggttgacctccataaggaattgtggtatgatttcggtctggggaagggaggggatattataacgttggccaaggagatttatcggacacaagatataggttatgtactacagtgtattgaggataaaagagccgtactgaaaccggttactgtttcctgtccgtttgaaaaggcatatcccgcctttcaagatttgaaaatcattcctcttgccaaccggatactgcttacttatctgaaggaacggtgcattgatctggaaactgcccgaaaaatatgcagggaagcccattttaaacggaatgggaagaattattttgccatcgctttccctaatatttccggagggtacgaaatcaggaacaggtatttcaaggcttgtattgctcccaaggacatcagtcgcatcattagcacgccggaaagcaggatttgctatatttttgaggggtttatggattttctgtctttcagaccggcttttccatctttggaagagggggattatatagtgttgaattctgtcagtaacttacagaaggctttttctttcctttcacaatatgacggcatccgttgctgtctggataatgataccgccgggaaaaatgcggtgcaggcattaaaggacaaatacggaatccgtatatgcgatttttcgcatgaatattccggatataaggatctgaatgaatatttgtgcaggaagaacaatctgctccatatctaatagatgtattgaaaagactgcctgatgatatacccttgtttctttcctgtcatatgtggcaggaggaaacaagggtgatttttcatgtggtgatactatgttaatagtagaatgtggtcagatgcgttttatggtcttttacaatctttacttcatgcatctgtccgtatatctcacgcatggataccggacaatccatcttttcccattcttccggggaaatcctcatgtcggaatgcctgaaacacagcatgaccatttcctgagaatcctcttctgcgaatatggtaccttcatggtcgttgacaaactgtttgagtccatcctcatccttacaggatatttctccgacgtacatatcctcgctcggccgggtgtttttgcggatatggattttgaaccattcccggctttccggctgttcaggtgcgccacactcccacagggctattttcgcatcgtagtaaacctccccgttttcacatgccccgtaatgcccccaatgcttgaaacggccggtagtccatgccttgaaccttacatcgcctgcctttaccaacagacactcaccgccatgcatatcgcatttgataccctctttgtcacgggacacgaatggaacacgggaaaaatcccggagtataatgttatctccatatacggcatctataaagaacagccgggaacgctcaccataaccggaaacaaagaacaggttgtctcctgtccgtggatactggccggagcgtgtcttttcgatgtgttccaccatggtattcactttatctatatcttcctgtacaagtccatatatccgatcataccagtagttcaggcggatgaaagtttctttgctatacttgtttgttgtctgaatcataatttccttattttgtgattaaacatttccggctttggcaaagccggtatttctatctcttacatgtcagacatttgtcttttgctctgatagtgcaaggcttggcgaaaaaataccgcagcgaagcgaggatgattttttcagccaaccagtccgaaggaccgccttgcgcatcagaagcaaaaggctacctttacatgtaagaaatagaaatgctgaccgatatatgattccaaaataaaaaaacgtataatctgccggttctgtaataagaaagccatgaaaccctctctttttatcgtttccatgactttcttatgtttatgtcgtgatacttggaaacgggtattaccaatgatcaaatgtttccaccctgtttttttccaacagaacaagaatgtccttttccttatataataatttgcctcctactttgtaatagggcagcctgccgttcattctgtaatcagccagcgtccttcgtgtcagcttcaatttctccgccaactcgctgtcggtaatgtaacgctctccgttcaggaccggacgaaggtttttctcctgatcatccagcattttggacagggtgcttatgttccgaaaaaaacgtataatctcagggctttctttggtcagtatgaattgagtcataaggattcgggggttacatggtgaatactgttttccaaataacgtataatatcctgacgcctgtaatataccttgcggtctatatggctgtaagggataatcctgcttctccgaagttgcaacagctttcggggcgagacattcataagcatacacgcttcctggttatcaatccagtcatccatactacagatgcctcctccgcatgtttcacgcattctcttttcaacggcttccaaagcctcattcatttccatgaatgccttagcttcgatacatacaaattccataaactctgctttttttgtccggcacgaaaatacgggaagtaaaagtcatgggcaaaaggatgtcatcaaacggcatcagatgtcatcagatgtcagagaccgctctgtttggggaagcaaattaaaagaatggctaaaagtctgtttctttaccggaaaaacagtatttttatcccggacaatctgtccgaaaataaaaaaacaggaaatatggaactgataatcaatgcaacattattactaacggctatcgttctctggatatacggacaatactggagaaaaaagtgcggcaaggtgctatgccaatatgcagcagcctacgatgagcgggaagacagggagaaaccgctacgtcaagccatcatagcaggaaatcctcatgcaccgctgttatatgcgctgacttgtcctgagctgtttgataaagtccgtccgttgcgattgttctcattcgggagcattcgctgcgtgtttgccggctattattttcccaaacgctttgaaagctggctttgtgatgaccagttggcattcgtgcaaaaagtatatgatttcaaggatggaaaagacagctgtacggaatatttttcacaagcattcctgcttctttccactgatgaggatattactgccatgtttatgccgtgcagcacatcagaccgctattacagacgtttctcaggtattgccggttttctggaaacgcatggctatgtccgttcaggactggatttaatatgcattacggaaagcagggagtgtaaacacgcctcagaaaaacgctctgaaataaataccgccaactatatgatgtcaaacgatctgtacggaaagcgcgtggtgattgtcgatgatttgctgaccagcggatccagcctgatggaatacgcccataatctggaaagggccggtgccaaagtggaaggtgctgtatttcttgcccgtacctttcagatgccttcgccggcaaaagtaaaacgcctggtatggaaacgccatctatcagtcctgatccggagaaggtctgacgacctgtaaattgtaaagtttacattcggattttacaattttacacctcgaatttttacatttcaatttcccctatactatttttatatctgtattttattgatttgcagtgttatataattccccgtccaatataaacggataatgtggcatacatttttcactgaacatggcatatactcttgaaagtgcgcacaagaaaagggtattccagtaataacctttaaaaagacaggagaaaattgccatgatgtatatagacaatgaagtgcttgaaaaaatgataatgaccatagtggaaggttttgaccgtatagaaaagaaactggacaggatgggacgcgtgaaggactgcctgaatggagacgagcttttggacaactatgacattgccaaactgctaaacgtgtcattgcggacagtcgcccgttacagggaaaaagggctgatccgttattaccagacggacgataacgggaaaaacttctacagaagctcggaaatacaggagtttttacagaaacgtgggaaaaaagataagggcgggaataccaacatgggaaagttatgctaactttgtttcataaacagttgttatgaagacaaatgccaattcaagatataccgttgcagtccttattgacggggataacgcatcctttgagaggatggaagatataatgggctttgtttcccgttacggggatgccgttgtgagacgaatttatggagactggacgaggaaagcgctttccgcatggaaggaaagtgccagggagcatggattcaggcttgtacaagcttcctcccatgttcccggaaagaacacgacggacattgcactggtcatagatgcgatggatattcttcgggacgggcaggtggactgtttctgcctggtggccagtgacggtgattacagcctgcttgcccaacggatacgggaagccggggtgaaagtgctgggatatggggaaggaaagaccccggtgtcattggtacggtcctgttccgtattcctgtatgccgaccggaaggaaagcaaggcagaggagaacactcccgaattctttatccgaagggatatggagtatttcgacaaggcttttgagcaggcggctgacggcaaagaagaggtttccctttcactgatcggcggtgcattgaaaaaaatgatgcccaaattcaaggtcaggagatatggatgcaagacattgggcaaactctatgaaaagttggaccggtatgagctggtcatgacggaaaagggagtggcaaatgccgtacggctgaaatattaaaccgcatagcaggagtgttccaaaacgtcagtttctcctatacatcgttttatgtatcaggagaaactgacgtttgtgttctataccgggatggggtttacccgtaatgtgtcaagattgagataggctccccggtagaacgttcttccttccctgagcatgcgccacaggacgtcgcatccgatttgtgccaacatggaattgatgaagagatcctgtttttgcaatgcctcagtcagcgagcagctcggtcctgaatccttctccctgatggtggaataagggacttcctccgttatgacgttcatcttgggtataggcaggtattcagtggaggagggctgcggtatcttgcttttgacattacctatcagtacttgtccggtggtctgggcattgccgaaatccatccagtatatcggtgatttctcgtcatcgtatgaacgttccctatgctttttcaaaaaacgccacagaccggtccgtgaacgggtggtgtccgtgcaggtgatgatgatattcgccaaaacggaatctgatgttcctgacggatagcattgcccttttgcttcccatgaaaagccgaaaaagcggttgatacgggttacaagtgccaccgccttgttcagtccgagctcggattcgctgaacaactggcgtccgatgttcgcttccgtgacagtatcggggtcaaaaaccgtcaagtgcaggcccggatgtccgagtgcctgcaatgcgatactcattcttgccagattggtggccacctgcgatccggttccgcccgcaccgattacgaaaacggttacgggatggtggggattgagcaggtatctgtctgtataatgaatctttttcatatcaataagtctttaagttgtctgtccataggtttcaattcgttatagtcaaacggattggtccgtgccttttccgtcaccgaaaccagattgctttcggtgggattcctgcttcctcccaaatgggaaaattcactgagccagaagcgtttttcccaatgctcaaggagttttgagaaagtcatgttttccggaggagtcaacgaggcatttcccaggcagacactgcttcccgttacattgaaaaacggggcaaggaaaagcgggctgtcttctgccggtgcttctcccttataggcaaaaatttccagtctgtcaccggaagccctgtaaatgacaccgggtacatggaatgtcccgtccggaatattcagcctttcggaaaagaacatctgccgttttcccggaggattgtaccagatgtacctctcgtgtcccttgcgtgtatcgcaccacagcatattggtggggattttcccatgcggtacatcctgccggttatccgtatagtattccacaagggagtccataaattcatacgtaacggggacggcagcctccatccggcctctgtcgttgatcggatgcagttcgagataatatgtcccgtgtccatagcggccatcactgtattcgtaagcaatcagtgccgctttgggaaccatcacctgttgaagtttcttagtcagttcattcatgtcattcgttttaaaagttgtcatcaatatagcctgtaaaacacaccaaccatctggaaagcctttccggatagtcatccatctgaaaaagactgtccgtttccggtgtcagtagcttgtaagtgaccggagtaagggcataggtttcctgataatccgaattcatataccccttgacacactccgccaatgtatcatcagcagaatagaccagtatgacctggctttccattcccaccgggggaaaatcgcattcctcttcataagcccaatcgtactggtagcctgtcaataccgggctttccggagtaatcaatgccatgccgtcctcaatcagttccaacagcttcagctctttttccttttttgtccggtaattccgcacagcctcctccaaagacttgcagaacggtttgcccgacatccgtctgagtgctttcatccgttttccagactgataggaatctgccagccgtttgttcgccctgatttccttcggggaagcatcggaatcccggtttccccagtcttccagttcttctatggcaaagtcataacaaaatgtctcagtaatatcgtacagtctgtggtgtcggacaaatagccggatgaactccctgacaatgttcttcaatgatgccgaaagccgttcggtaaaatcaaccggaatccaaaacaaagtaggttccggccagtcatgatggcggaacagacagaaatgcagccttccgtccttcttttccagattgatacactccggtacacactcttccataactctgtacaactcggtaatattcaggcgggggcaaccccctttcctgtatcggaaagggagttttatacccataagttccgcatatcttgatgccgaccggtagagatagtcaaaattttccggagtcgtgagattgaccggagaatcattatccatatcctgatgccaataatccggtgcaaggggtgtgattctaccggtcagaaaagcattgtgcttcccggtggcagaagtatccttcttttccgttccgaggttccccttcggatgtgggacgaacttactgagagaataatcagccgtgccagtccatccttggcttgttctgaaagctgtctgcatgtttccttatccttttttttcttgttcataccgcttaccctttcactccgatggttgtcttgaagcggtaaaccgccttgtcgtcctcccactcaggaccatgtaccgttgccgtagtcagttcagggtaggtcatggaatagaagtccatcacctcgtttacggacagttcgctgttcggatcatccaacacgagctccacggagtccttcttgaatttgaatactctctgcaatcctttgatttcaagtgccatattatttttcttttatagggtttaacaatataccatatccatttgtgccatatccgtcatgcggcattccttcggaaagtccggatattccgcataagggtcctccctgagtagctcccggtcatcctcgtaatccttgtcgaagttatacattgcagcctcctgcaccgttgcatactgtgacggagccggttgttgcatccagcgattgtccgccaattgcggttgcggcacctgtaccggttgatggaactggatttcttgcggttgtggagcagcctgctgaggaaccggttgcggtgcaggttgcctatattgtacgggctgtacttgcggctgtgcaacgggttgcggagccggggcaggctgttcgggcatggacatcggaacttgctcttcgctccggtattgtggcgtctgggctgccatcggttgtggagccgattgctgcaaggatggctgtggatcagttaccggcggctgtaccatgtcgaacagacttccctcggatgccttcttctgcacttccgccatttttttgtcaatgtccgcctgtttgtccggctgtgccagtaccttagcctgcctgagccaggtcaatgcttcggaataatgctttcctgccgtggcatcctcagctttcttcagcagtttttccatcttttcccgtttttcacgggcttccttggactccttttccaccgtaggcttggaggttttgctttgtgaaaccgcctgctctgcctgcttctcgaacgattccaggttggtaaggataccttgcgctttctgtacgggtgcaccgacagcctgcaggaatcctgcatccagttcttccggcgtaccgttcaggatgagcgggacaatgcgttcgccggcctttactcccgaccgtctgggaacgacggcaaccgtcagattgtcgtttacccgtctgatgttgatactcaggtctgtgcctgccgtaatcatttggttgattgcttgaaaaaacataatggtaaaatttaaaatgttatacataagtttccttgaaaaaatccttcaggattctctgcctgtccggattcgaggcgatgcctttcaacggttccagatagtagccgatacgtctgggcccgtctgtcgtacagggaggctgtcttttgacaggtgttgtccggtttgtggcaggccatgcagccggcatgaccggagccgaggatgtaaatgtgtaagttctcatatcttctgcatttgatggttatacaagcatgcccatgacaatcaggacaaggattgttttcaagacaaaggtgaatgtcctgaaggcgagacggaccagtgttccggacataaggaacaggacagacaggtacacgggaatgacgcccttgcagtaaagcaggcatattcccgtaagcagaaccagtgcgaccacttgcctgcagatgttttcgatgagtttcagtttcatgtctttaaatttttaagaatgaataatcccatcgggatatgttttcccgattttataggcctccggcccttggattgcctttttgcgcaaggcttggcaaaagaaaataccgcagcgaagcgaggatgattttcttttagccgaccagcccctgaaaggggccgccttgcggcaaaaacgaggcaatccaagacctttgccgcttaaaagcggaaaaacgtatcttgtacatatataaaaaagaggcacagaccccagtctgcacctcttctgttccgtaccttccgcccagccgtctatatggaaccatgcggctgtccatcttccgaaagtttccggaaaatctcaccggtaacctcatttaccgtttccaatacgccatccagaaattctttctgtgtgagttctccctgttcaatccgtgccagctccgcttcccagccggaggtgagggaggcgtcagccactttcattccgcgtaccgtttcatataaaagaagaccttttggggtcgggataatgtatttgcccgaataccggatatatttacgctccagaagcgtacggatgatattcgtgcgcgtggatgcggttcccagaccggtcttgtccatatagtccgccagttcctcatccgtataaggggcagcgggcagcgatttcctgtgtataaggctgcatcccgttaccggcagcttctcctcccgaaaaagttcagggggtacgggacagaggtcgttgtcttccgcgacaagccgttccctctgaaagataccgagccaccccgcttccagaatacggtatgtacggattcggaacttgcgtgcggcacagaccgcttcaaccgtcgtatattccaccttgcagggcggcatgaacgtttcaagcatcctgccgacaacaagggtgtaaaccagcctttcctccctgtccagttcccccggctgtatgccggtgatgacaatggcatgatgctccgccgtgtcctgatttccggttacgcctttccttgcagcaaggtcgatcataccggcatattgacggaattccttgccggacagcagcttttccataaccggaggcaacatgtcatacacgtctccgggcagcagacggctggaagtgcgcgggcaggagatcagttttttctcatacaggctttgggtaatttcctgcacccgtatggctgtcaggttatggtaacggttcgcatccttctgaagcccggtcaggttataaagggcaggtgcggtgatttcctcagtccggctgttgaccgccgtgatacgggcatatcctgccgccttgcagtcctcgtaaagttccagggcatcccggcggttgcagaaatcttccacatgccgcatctttattatcttcccgttcttgcagaggctgacgaatacgggccagctgtctgcgggaatgtgattttccctttccctgtaccgtccgcttatcgctgccaatacaggggtctgtacccttccaagcgagttgttcccgaaaccgaccgccttgcagacggcatagctcgaattgactccaagaagccagtcggccttgttgcggctgtctgccgccaaaaacaagttgtcgaacaggctgcagggacgaaggttttccattcctttggcaatggcttcgtccgtcaaggaggagatccacaggcggaggcaaggtttcctgcatcccaaaaaacgataaagataccggaacagcatttccccctcgcgggaagcgtcggttgccgcaacaatggtgtcacacgcatcgaacaccccggctatcaccttcaactggagcaccgcattgatgtcgggattccatcccgtgtccgtctttacatgccgtaccgtcagaaaaggaggcggcagcagggggaagttctcccgctccacccatgccgtaccggtatctttcggcatcgccagggaaagcatgttgccgtatgtccatgttaccatgtatccgtttccgctcatatatccgttctcttttctgtcagctcccaaaacccttgctatctctctgcccacattgggcttgtcagtcactatcgctatcatattctttttccttttgatgttccgtaccgtcaggaacggcacggaacgtgagttatacttattgtttcccggtcaaactgccgcctcctccttctgacggagaccgtttatttccataaccggtctgccgttgccgtcgggtaccagcttcagcgtggcatccattgtcaggctgaggaccgaaatatggagtttcagcggaacgatgcccgtttcctttccttgcagcaacagttccatgttgccttccgcttccagttgtttcttactgatacctgcggccttcagaccgtcccagtcgatatcttccgtcttataaatatgacgggtattctgatccgtattcatacgattcgtttttttaggtttgtatgattgattctgtttctctccgggcaggtctatactgcctgcgatgcacccttcttctgctcctgctgttgtccctgtgcggtctccgtctgtgcggcacggcgggaagtgtccctgcggatgtccggattttcctgaaaatactgcaactgcccggaatagggattgactttcaggtaggaactgaaggtctgcccgttgtttttcagcccttcgacaagcaaagtcttgccatcctggaggttcgctttttcctgtgccgtgaacacgtgcccgtaaacctccgccggaatacgcggtgcctgctgctcgttgaatccgttcggcgtgcgtgaatacatcgtcctgccggtattcatatccagcttgacgaacgaggagaattcctccccgttgcgcccgatcatgttttccagatagaccggctgtcccttgcgcagggtttccctgtcttcggcagtcagctgcacgttgcagatttcctttggaatataaatctctccggtttccggattgtgccgcgtgtagttcgggcgccccgtaaccttgtctatcgttacaaaggacgagaaggtgtcattcctgttcctgaacttcatgtcttccaccagaatggtatgtccttcgctgagcatttttatctgggtgggcgagagaggcacgcctccgatggaacgttcgttgaaaatctggtttttcggaaagatgaattccagtcccctgcgctcggcactgtactggagtgtggcatcgaattccttgcctgctttggaagtcataccctccactttgacaggctgtccctccttcagcagcctgatctcctctgcggtaagtttgaccccgctcacttcctgcgggatgtaaacgtgctcctgacggacggcaaccagctcgttggtgctcttgtcgatggaaatcagacagggggtatattcactgccgcgcaggttgagttctgccacacgccccatgttgccggtctcacgcaggtttttcttgtcctcctcgttaaagttaaacccgaaataaggacgctccaactgcggttccttgcgtatgccgtgaatggccagtcccacctgtccgtcctgttgcgggatgagtgagagccttgcatccagtttggctgtcagcaaaccggaaagatggatggtcaggggcaccagtttgttggtcttgtagcccttcagcatggaatcaaggagtccctgctgttccagcgaagcctttgagattccgaccttttccaactcctcccagttgaccatgttctcattataccggtaacgcggtccttgcgactcctgcgctgcctgttgagcctggggctgctgctgttgctgtgccgcctgctgtacttcgctctgttgcaggggttcctgcggttgtgtctctttgtctgccatagctgttttttctttttggtttacactttgttccttcttgttttctctcggacggatttcgtagcgtttgaggaactctttcaccgcatccgtctgctttccctccgacaaatccctgatggcctgcttgttcaccttgtagtcgtggtaggtcatgcggagcaggcggaaatgggtaggttccttgagctggctccaaaaattcttgatgaagttttcgagaatactcgaattcttgtcgaatttcaggaatgagttttcattcttctcgtccgccggaaccgtcttcgcttttccgtccttgtcaatttcactgacagcctgtacaccgaatttcggatcgttcttgttatgaacaagcatcaattccgtaatctgttccaccggaagagcatcacttccggccttcggtttccgggtccgtttgggcttttcgttcgggatcttttcttgtgccataccttttcttttaggggttaatgaattgctttgacgcttcaaaggtatggggtatttccaaataatatgctgattttcaaaaaggtgtcatcagatgtcatcaaatgtcgtcagatgtcataaacatgactgttcccaacggctaaaccgtgaacggagaagaagggaagtgaataaacggaaagagagaagatacgtgaggcagaagggaaaaagcctgcgcatccgacaccagaaaagagcaggcgggcaggcaagacaaaaccatgcagaacagagggagctgaagccccctgtcttctcatgccttccgcttttttacagcaagactttcataagacctgtattccggctggatatgtggaatttcatggattatgaaatacggcctcttcaagcagcccatatcctttatccatgcgtcacatcggtcgcagtttgcccctgtaatcgtttttcaaatcgaatctggattgccgccgcattctttttcgtgaaaattttccacggcgaagccgcaaggaaaatttccacgaaaagattcggcaaatgcggccggcaagacaaattcgattttcctttgatgagggggaaaactgtatcgcaaacaaacctatctggaaattccgtgcaggctcattttcttgtaaagggtcgggcggctgattcccaacaaggccgctgcctgtgtcaggttccctttagagatggaaagagccgtcttgatctgttctatgtttcttctttcatctttctgcaaacacttgtctatcttctctttccccatggggtcagaaacgggctctcccgcatattggagccgtaaggaattgggggtaatcagttttcctttgcatatcaataccgccgcatgaatgacctgcttcagttcccgtacatttcccggccaactgtatcccagcagcatcttctttgccggttcgtcaaaatccaagacctctttccggagcaatccgcaagattgctcccggaaaaaatccgccaaaggcagtatatcctccaggcaattatgcaatgcaggtacggtgatggtaaaatcctgaaagcgataaagcaggtccttccggaaacgcttttccgcaacagcctcctgcaaatcctcattggtggccgcaatgatgcgcacatccatcagcctgtcccgttgtccgcctaccggacgataccgccgttcctccatggcacgcaacagcatccgctgcgtttctatcgaaaggttctccacctcatccatgaacagggtgcctccctgcgcttcctgaaaatatcctgccttttcctctgtggctccggtaaacgcccccttgacatggccgaaaaaggcggaaggtgccagctctttggacaaactgccgcaatcgaccgttacatacggcttgccggatctgaggctctgcctgtgaatcttttttgccaggtgttcctttcccgttccggtgcttcccaatatcagtaccgtcatatccgtcggcgctaccatgtgaatgtaccggttcaactcgcaaaaaggggtgcttttgcgttcatagattaccttggtgaaagcctcgttcaccgtccttatttttttgattacgggcagcagcctggtttcaaccagcggtttgaggatataatcttccgcacccagcttcatggtatgaaccgcagaatgtatctcttcataattagtcatcatgatgaacgggtgcatatagccgttctccctcatccactgcaacagcgtggtactttccccgtcaggcaatcttaaatccgccaatacgatgtcatcctcacggacggatgtcccaatgaccttcttagcctgtgccagcctgtaagtccttacagtatccaaatccgccttctgcaaaaaattgcagatataattacagaacaagacattgtcctcaacaacaattactctcataagctttcttagcctgttgtgccaaacatattatttcttttcctttttccaatacctgctgtacagtccgcccgaactcgtccacagaaaactctcccgaatcctgaagcagtgcgaacaactcatgcagcggcttgccggcatgaatgatctcccatgagcctgtcagatgatgtatccattctttcagtgcctcatgatcattcttttctgcacattcagccatagcctccatatccttcctggtctcccgaatcagggtatccagcatcttccgcctgttcccatatttcagcagggcatcgaggtctatctgttcagactgcctttcacttcccagacattccgtacatacctgcaaaagttcttcggcggaaaacggctttttcaaacagcccgaaaaccctgccgcatacaaatcccccgtatcgcagtttcccgatgcggtactcgcgataaccggaatgctccgtgaatttcccacattggccatgcgcaggagcttcaacacctcgaatccgtttgtccggggcattttcaaatccgtaatcaaaaggtcataactacggctgcggacatgctccatcagatcacgcgtgttctcacataccgtgcaagccaccccgtgatacgcaaacatttccctgattgccgccagcaaaacggtgtcattgtccaataccagtaccgtataggaccgtacggaaatccggctcctgccgctctccgccatcgcttcctctgccacagccaaaggaagacagacagtgaaccggctgcccacccctttccggcttgccacttcaatcctgccgtccaacaatccgaccagaccttttactattgaaagtcccagtccgaccccttcttccgcaatcgcattgggaagcctctcgaatgcagtgaaaatgcgtgtctgctcctcatcgtccattccggtgccggtatcttccacgataagcgtcaatacgccctggtcaaattgtgtgcgaaccgttacacttccccgctccgtaaacttgattgcattggacaacaagttgcttcctatctgtattatcctgtccctatctcctataacaaccgcatctccggcactcagcacgttcagcaaaaggttttttcctgccgccagcggcataaaatccgtttccaaaatctcggtgacggaacataacctgaacgggacaggaacggccttttccccgccactctccaaccggaaaaatcccaacagggaattcagcatggaagacatgtgtcccgccacctgccgtatgttccggctgtattccctgcacttcgacacttctctttccgtggaaagcaattccgcatagctgctgatagaagcaagcggcgcacgcaagtcatgggttacggccagcatgattttctttcttgcctcaatcagttcctcgttttcaagaacggtctgctccaactgacggactgtgccttccagcctttttttataacggtttatacgcatcatatcccggtgtatcaccatataggaccatatcagcagcaaaaccatgaatgccgtcagaccgatgaccgtggcaaatgaccgtttcccggcttccgcaacttcttcttcctgtctcttcaagtccgcttgtaccgttccatccatattctcaatcatctgccgcaactgcacattcagccttctgttcatcccatccaagctgtccgtccgttctgccagcttccgggcatacgcctgctgtctgccaaccacgctccgattaagctcatgaagcatggaggcggcagaaggagaatccgccctgtggcgttttgcgaacaacctcttcaggaatcccccttttggggcattttcccgttcactctgtctggcaatggccggaatcttcgctgcaatttcccggtcggcttcctcctgcctgtgtacccaatatatgatttcccgcatataccgctccttggctctccacaaattacggatgctgtctgtatgtgagccggaagaggagtacctcaagctacacaacaggctgtcaatgtgccgtctccgtttctgaaatgataaaaaatcctgctcactccactccataaaggtttcacagaagaaagaaagcctgagcattttcacgtatatatcatttatctcatgctttttccggttaatcatccgtacttccatttccctagccttagtctctttccattcgcagatgccaacgtaagcaataccacttatgactacaatcttggccatatatcctaccgctattttggcaagaagcggttgcaggcgcaaagatttcaacaatttattcctactttccaattattcactttttaattcattatattctattaaaattctttgcaaaataaaccgaccagtcggtttattttgcaaagataagccttttccaagaataatgaaaaaaaacaggttccagcaagtaaagttttatcatttatcagtctaaaagacaacggaatgaactgaaagggaggaaaaggaaaggaatgcgggcttaaatttctgagaacatccccaagaaagtcttaccaatagaagtgttcaatgcctgtctgctgaacgccttggcatccttcaaacttattttatgaccataagccacattggaaagaaagtcctgttcccggacaagaagttgctgatacatttgtggaaattcgtccatatattcatgggcggaggaaacaaactgcatataacatatcaggagattgccattcagatgttcgggaaaactgtttatcacccgttctatcggatttctgtattgccttaaaaactcattccaatccttgtcagccaaagaatacatttcacaagaaatctgcgagtcggggaaaaaacgcattctgacaaccgcatcaatcagtttctttttggaaggaaagtagtgtatgacagcccctttggatttatgcacggcaacagccacatcacagaatgaggtctgcttcattccttttgtgatgaataacctgtatgcctcctctataatccgctgtttcaaattcgggtccatcctactgcctatattataaaaaaatagcacagacgcaatcaacatccaaacatggtagtggaatacctagagacgaagtgacgcacctgtgctatatattttaatatagcgcaagctgtcatattccatcttgtctctttgaaattttccacttttcgtttggaagatgatatatgatactatactatgtcgttttaacagcgcaaaaatacgttatttatcgtttatttccaaatttatacgacacttaatagcactgttccataagaaaagcgtccgctttcagggacaagcagcagtattttttcaccggatttgagtttacgggtagaacagaactcatccaaggcagccagtattgctgacgatccgatatttcccacccaggtaagattggtaaaccactctcgtttgtacaattcaaaactctcgtttttcatcgcttcaatgagattaccataaataaccattgacgaagagtgaggtattacataatccacatcgtcaggagtcatgccatgtttattcagacatgatttaatatgtctaatccataacggcatcaacttcgtccctaaaagtttaatgtcctgtttaataaccataagggactcatcgaccaattcctgactttcaaaagatttccagcttttcagttcaccgtcctccctccggacagctccggcaaacatacaggtaggggtttcattggcatatgaatccatttctatccattcaatctttaaagatacgcccttttctcccggatgattttccaataatgcacaactcgcaccatcgcttaacataaagcgcaggaagtccttttccaaagccatatatggattggtgcccaaattgcagcatctttcatattcgatatcgaagtttttggataaaagcattgctgacaccaattcagatgtgctgcatattgcattctgtttttctgatgcagctatgctcaaataagctattttcagcgcttgcagacaagacagacaaactccagcagaagagaatatttcaacaggttcttcccaaagcccatgtaccatagacgcatgagaaggcagaatctgatcaggggtcgcagtagcacaagcaagcaactcaatgtccttttggctcttattggtcaatgccagcaacttacgtatagccagcatcgccatttctgcatttgtatgtgtgatttcttgatttttgtttaaggcatagtatcgccgtttaattccattttgctttaaaactatccgttgcactttggaatgttttccagaaatgagtcccaagaactcttccatttcatcattggaaacaggagagttcggaaagaagcttgcaagcccagtaataaaaacatctttcttcattagttcaatttttaattagttcatattgattataaagaactactttcagttcttctattcgcaatccattcaccaatgcatcctgaaaacattttccaaacagcaggattcgaaatgtcaaagccaatgtagaaggattaacatcggatcttatttcttttgtttcaacagccttcacaaatattctttcccataatttaatctccttatttgttatttcgttgaaagcctcgttaaatcccggatagaaatattctgcctgcaaaatcaagttaagatatgcacgtgtaatattggtcttctctttttctatgagatagatcctcattgcattcatcgtttcctccaccttctttatgtaataatcaataaattcaagcagagaggtgtgagaaatgtccttgaacttatttttggcatcttgtttgtgaaaaatgtaaaaatcaatcacatcaataaacagttcttgcttgcttggataatgatatgacatacatcctcttgataaattcagacttttttctatctccttcaggggaaccgtgttgtaatcttttgtcagaaactgtttgtatgcagcttccctgattaatctttttgtttctgagccttttactcctttcataaccttgttttttagtatcatacaaaagtaggtcttttgagtgaaaacacgttcatttttagtataattaaatatgtcctacccaattaccattaaatcatttatgaccatacataccagtttatgaaataaatgccaacgatgcctttttcttttttttcttatacatatattattttttgcttatatttgtcttcaaataagccgattagtcggtttgttcggcatagaggaacccaaacagaaagtggaatttcaaaacagagatgttcctctatgtctttgttattccatcttctggcaaccggattctatccctgttccaccatatccctaaaaaataccgaccggatggtattttttacggcaaaagtataaatatataccataaaaacaaagggaaaggccaattatgcattctatcggcaaagaaatgcctatgaaatatacataatccgcttttccctatgagaaacattatgttaccggcttatcttgaaggcatcttcatcttaacctgcaccccctgtgagtttaaaacacgaaccggtgtcttttctccggctttcaaatagaacagaatataatccttcgcacgctgggactcgaagaaacctttttcgcgatattcggcaatccacctctgaatcatcggaatctgccaacggttcatcaaaatatagtagccgaaataatactccaaatcgctcaggaaaatattgagtttcaagtaatcccaccagaactgttctttctttttgcttttggcattgagtatgataacctgatgttcataagtgtcacgaggattttcccaatcctgttgcgaaacaaatacatcgggaaccacattatcggcatgatcctttgccggaataaagggaaataaggattctattgaatcctttatctttccatataaggacggttcgtactccttgttgtacagcataacatcccgcaaacgggtggaagtgagatgggttaccacggaacgtcctaccacacaatgatccggaacagtcattaccgatgccagacgtttcataaatctgacttctgcttttgcctgttcttccttatccggtctcttgaaaggataatctgaccaggcaatcttccgcatcccccaatgcaggtctgtaagttgcaaccccgcataagcacagaaaatggaagcacgaattatcttgaagataggggtacggtcaccctcgtgggccacgtaaggcaggtcttccacgccaaaaagcatttcattttccgctatcaaatcggcagagaccgtcttgccttcttccaagcgtcccttaatcttgaagttacgcttttggtatccccaagtgtgaacaggtcgcgtagctatcagtgccacacaataattgccgttttgcggcatgaaatctacattttgcggtgttgcattgagcatcaactcgttcagcaacttaatcttttggatatagtccataaatcaacaggttttaagtgaaacattttgttaacagtgcaaatgtaggcatcaagtttcgtaccggagttccgtttttcgccgaaaatcactgcagggtcaaccaattattcaatatttattctgttctcgattctcagtatatagtttgtttccgagaaaaagcgttccatacgtactgcctgaccggttctgaacaaaggtttttcactattggctatgtaggctttttttatgggaaaattccgtgcctcttcctgttgttcaaaataaccaatggtagaacgcaactgctgttcgccgtcttttatccattgattacccttgccttttctttgtttcaactctacaaatataatcgtatctctataaaacaggcagccgtcgcagcggttgtccatactcccgtccgccctgcgcagttcaatgcaatggtcaaccggtacgaaattcacctttacctgaggataattgtccactgccgcaatccaatcctgcccctgtctttctgcaatatatgctttttcagcggcaggagccggccggtcgcatataccgaatttgcgtctgtttgatgatgatatatgttgtgtcgggaagaagtcaatcataattcctgttgtatttccaataaatcggcaaaatcttcgtttgttctctccagcatcctgttgaggaagttctcatcggaaggaagcccatgatatgtgtccagtactgttactgtcccttcgacctcgttgaactcgtaaatagcgatttcgtcagggtgtatggcagcttctatgggataaatagcatttatcctttcttgtacctcacaggaaagattacctacagccaacagcataccggctttgacagcgacggtcaggctattaataaggtatgggctatgtgttgtaactaccaaacggtttgtttccaaagcattgttaaaagccagcaactgtttcattatcatccattgcgattccggataaaggttttgttccggttcttctacaatgttgacaaatgccgatttgttgaatctggcagaaacggctgaaagggcaatcctccgttgctcgtccgtaaggttcggtatgttccatatattcgcaacttccgcttcgaagcgtttcgcttcatcgctgctcatcttctgggcactattcgcctgactttttacagattcggacaaatgtaaagaaaccaaataaagcggtacgatggattggaatccgctggacgcttccatcaacttcaccttatagtcctcacctttgacataaacaatgtcattttgtttgttatattccagttgcgcatgattgataggcagttccagactactcttaatgcgttgtttggctttgtcatattccgtaagaaaacctagcaaggcatccggcaaatccttaatcagattcggtttgttgaccatgctgatgaaattccgttcggcaggaacgtacatgatttgaggaagggcatagctgtccaatgcattctcattcttttctatgacaagttcgccttgcttcgtgtaggtaaacttgtaggaatccccttcgtagaaaatctcagtctgttcctttatgaaataattggaaatacgatggtaaccgcaatacttgttcttgaacttggcggcggtaaattctttctccttgaaatcaccccgtgtcaagaccttctccatccatgtaaaggtggaaaccagtttggcaaccgtacttttaccgctaccctggttacccgtaaaaacggttactttctttatatctatccatccgtccgttacagatgctgtttctttcaacggaccgaagtttttaatcttgattctactcatatatttattgtatagacctgttacaaagatagtgtttctaaatgaaacgacctaatgaatgttgtgtttcatttgcagtgaacatagaggtcttcccaattctttgtttttccaatttttaacctgtatgttttatgatggttttctaatagtcagaagtgtcattctgatatccgaatgtgtatcagtcggcattgaacggacggatttcggaaagattttcattgccgctgtcaataaagcggtcgagcaccttaatcatgacaacaggtatattctgcttccatagtatctgtgcgtccagctctgtacaaaccaatgccatctgtttcaattctttttccaagtatgctcccgaactgatatattcattcagaagaggtttgttttcggataatttgattacagaggcatataacttgtattgttcattgatacatttcaaatgaaacttgtcctttagtgtggaaggcggatcaagtaatttcagtttgggcaggtctgacttgttgagaataatcacagtatttgtaaattcgactgtatgatctccaggcagactatacaacaatctgttgtcaggggatttgaacttatactcgttttcctttcgtaaattctgaggataagcattgtaccagttgaagtggaatccgatgattatctgtttgtcggtcaatcttaaagtctggaaggccttgtcaagattctccggaaaaaccctatattcacttttaggctgatactggaagcttcggagccagcagtttttgaaagagtatagtgtagcagcactgaaagactccttaaaattgacatatcctattgttttatccgtacagaatgcctctgccggcatcagctgacgtattcttccgacacaattgaacttgttacagcttttgtactcatcatcagttatgacagaaacttctgtaatccacttcatttctctgccaatactatctgatgctatttggtaaaaatcctgaatttcatcttcagacagctgttgagtaactttttgatgttgtattgttgaagtaagcgaattggaaagggactccagtgcattcttcagcttatgtttagccctgtatatgcacgactgatccaatggcagtattgttgtgatgtcttccagtggaatggaattctgctcaatctgtttcaggataatcggaacattttccagccattcgttcttttcggataaggattcaggaagagccggcagtgaataaaaatcctcgtaaacataggtgcggttaagtgttgccagacgtaacattaggatatacaagtatttctgtatccagccattgatgatgctattgttgcgtacgccagcctgaagaccaaaaaatggatatttttgctcgtatttgtacattgaatcgggactgaatgagagcaagtccatatacagtggaataatttcagccagtgaacttggaatcagtacataatgagggggttggctattagtgtaatacaatatttgatttaaaagttcatattcttttctatataacaaaagtccacctaatgcgatatgaaactccttaaattctttccgttctttctgcctaagctctaccatttggctgtttgcaacagtttgtccagatgaagtgtagggaacgtttatacgttcatcaagttggaaagatgtaagatgaagaaacaagtgtgaatgggctgcaccccaatatttaagaatccattcgctgcgcttgtaaaacaattgctggttcaaacaagtccaaatcgtacggtaggtattctgatgcattatggtgaactgaaaatcatccagcattgcattgactatatcatttccgttcttgatggaaaccgcttccttttgttgcatgcacagctgctcattaatggagacaatgccttcgtataactccggcggatattccattaacgtccattgtttacctgcacgtaaagatatgatccagtcatacaattcctgatagcaatcgcgcaatacatccacattgttctgtttgagcatggcaataaaaagttcgaaccacgcttttctggtatcttgtgggatattgtttctttttatcaaatgcttttgcagcttttcaggtacattatagatatagataagcctgaaaatcataaatatactgaatgttagcagtacacagaatattgtcgcgagaataatggcagaataatctatgtactttgtaagaactccgaaatcaaaatagttaggtggagcgaccaattgatagaacagtaaaaatatggtaatagcgagcaagccaagaaaatgctttgtgcttctttcgttcataaagagttgtatcaggcgggtagattcatacttatcgtctatccgctgaataactccaattaacaagggaacggcaatgcccagtatggctgccgttataggtataataatttctttagaaaaaatgtccataatataaaaaatgttcaatagttgctatggtactggaggaaactttatgcgtccttctttatcgatggtacaagataaggcttccccttgaatttttttagctatacggttataatttgttgctgttcgtgtttttaaatctaccatttctttccaatcaaaggtatgctctatattaaaaacattctgttcatttgctgaagtaaatcgcatggatgattttacatggatattaccctcttgagaccggacattccagttaaatctgggatgatattgtaattttgcagcgaggcataatctttcgactgttgcctgaattatacctatagtcgtgtttaaatctttcagactttgggagtaataccatttgaattcatcatagatttggtaatccaagggattctcaaaaggttggaacaactggtaaattttgctcaaaaatgatgaatcatagtcatgtaaaaatgccggaacctcctgatccattaaaacacggcagcctttggccccagcctgttccaatttgacagccttacttacagcatttcctagcaacatttgtcccaaattagtgttgttatcttcaatgatatctccgtatgcaataccaccacgacatagaataccattttgcaaacaatcccacataatagtatgacatgaaagtatgacatctttcatgttttcagaccagacgaaagcgcaatcggacaactgggtgaaatttactgtagggtatttactctggcagtttgccaagattttccgaaaaatgatcaaaatattggctgcaaattcctgattccctgaagtctgaaaatgtttagagacctgccaaatattaaaatcgtcttctgtaagctggattttaccttgtgttaaagctgaaaatcctagtatatccacatagaagacaaaaccttttagattattcatgttcataatgttatcgtttataactggttgaattttttttggacattttgagctatactgatgaaacagttgggaattgtaacatattagttgttgcttgtcacaaagatagtatatctaagtgagatgagttaatgggggctttgttttatttttgattttgccaataaatggtatttcctaaaataattttgtatagttcttcatttttattgtaaaacaagttatattcttctttatgtttccatcttgaggctgttttgatgactttaatgagtttattattatcataaaagtattctatagttgaactatcaccataaatattaactccaacatatattgaattctcattatttactatttcaaattttgatatagatattaaattaattacgggtgtattttcattttctgttgggtaatatttgaaataggttttgttatatccatgtttagaatattcatataaactgatatataaaccttttcgtatatctgcatctatatgttgctctgaaataatcattttgttattttcatcgaagccaaatctgaacaagtcctgataattccatttttcaatggtcatgttttttaaaagtctaccttttttttctttattaagtaaatgataataaggtagtagattataatattccttggtcgaatattcccatctatgtacattttttaaatattcttttataagaagaatattattctttttttgtaaacttgttatttttaattttaaatctgttaacataattgtcgatatttaatataaattacttatgaattaatgggttgaattgttccatcttccactttctatttctgttccaattttttgtaattgttttctgacataattgtcttttaaattatcgcttaatttattgtctatcgcatatttctcagcactctctaataattcacatattcgtttatcactttcaagcgaatgtatgtaccctgcatggtaagtaccagtagttctggcagcttctcttcctggatgtccagattgagttacttgagaattagcagtaccccatagagcaactccattttcggcatcattaattcctatgtgacacctttccaatacggctttggatctgtttacatattcattattccgattcaattgaacaatatgatgtggagtctgtccagcagcaacaggcctataggcattttccatagctttttttaatttataagcatgagataagcctaaaatatcaagtgctatgttagtagaattaacatatctatatattgctaaaataccagattttaatcctataggatcttgactcatgtaactaccaattcttggttcataatacctaaaacggttgtagtataatcccgattcctcatccacatattgcccttgaaacctgaatggacaatcaaactccattcctttatttacagtaatcacttttccataaatatctagtgtacaatcccaagttttgtttcctttttcatcgtacatctgaataggtgtacccaaataatcggacacaatagaatattgcttaccatcctgtatctttgctgttggtacaaacgtgcctgcttcgaacacccaggtggtaacatcttctgccggttcttttggaaggatgttttcctcttcgtccgattgtaagccaacggctttatagctccattcgtgtaaaggtacgtttccgtcccacacccagcgtgtgacctttccgaaatactgtttggcggtgcgtcttcccaacgcatcgtaacggaactccaccggtcttccgtccggacgtataaccttctttagcataccattggaactccactcgtagagccatcccgtacctgtagccagacagcggacgccgcgctccttctccatgcgcttgcggtcataccttacgcccgtttcctgcaaccgtttgaactcacggaaaatgaggtttccttcgtcgtcgtagtgatagaaacaatccgggtcttccaacagttttcccccgggaccgtatttgcggtcttttttgtccggtgtctcaaagaggttgcccacgaagtccggtacgcggtaaatcacgtccgtttccgagccctggatggtttcctgccggataaggaagtcgaaacggtcgtagtcgtagcgcatgaccgttcccgtcagctcgttctccttggcgagcaaccgattagcgacgccccactcgtagcggtacgccccgcgctcgatgccgcccgcgcggacggacttgcgcacctcgcgcccgaaacagtcgcgctcggtgctgacggttacgccaccggagaaggtgcgctgcacctccagccccgtattgtcacgcacccacgatgcctgccagctctcgcctgcctgcatggtctgcaggttgccttcccggtcataagtgtgacgaatgtccgctcccagactgctggtgatgcgggtgcagttgccttcgctgtcataggtacggctgacggtgtattctccctgcctttcctctgtaaccagtcccgtcttcctgtcacgggtgaattccagcaggttctcgctgtgtttcgccctgacgagcatgccgtccttgtcatacgtgtagagggagacctccccgtcatactgttcctccttcaggatattgtccagtccgtcgtactggtattccgtccattttcctccgggacggttcacacgggtgacacgacccgcgccgtcgcgctcgtactcacgccgcagaccgtcgaagccggtttccgtaacgacctgtcccagcccgtccagctcgaagaaatagttgtcgcccacctcattgccgatgcgccggagctgcaactcgctgttgtagccgaatgtaatccagtgcctgtcctgctcgcggcttttcaacacccccagcgccccataggtgaacctgacctcgcggatgttgtcgctggcatgtaccatgtttcccatggcatcgtactcaaaccggtgcacgttgccgtccggttcttccagccgtatcaggttgtccgcccgattgtaggcataacgggtaacattgcctttcacatccaccgcctgcacaagccttcccctgccgtcgtactcccaccggcggaacagcccgttggggaactgcagcagctccaggtcgtacctgtcgttgaacgtgagcgtgtaaacccggccctgtccgtccgttatggtacgcaacacgcctccctcgtagacatatttcacagtttctccacccggtgtggtccggctgacgacccgatcctgtccgtcatagtcccatgaaagcctctttccgcacggagtgtagagcgagaccaggttgcggttgttgtcatagtccaggaaggtgtcctccccgttctcgtccgttatccggaccggcagtccgaactcgttgtaggaagtcttgcgggtatagccttcggggttgaccgttacctccagctcctgaaagctgttgtactggcggcgggtaattcccccgttggcatccactatcttgtagatgagtttgtcctcaccgtaataatattcggtttcggcattttccccattgcggatatgggtatatcccttaccgtaacggatgaaatattccatcacgcctccatcgccccatgtatgcacacagcgggcattctcacccttaccctcgtattcccaatggaaggacatacccccttggttggtaagctgtaccagcaggtgcccgccggaatagacgaaatgcttgctgacatccagcgcgtcaatggtttccaccatgtcgccccggtcatcgtaacggtagcggaccagcttcacctcctcaccgtcctgatttacggaaacgcagagcacccgccccgactcgtcggtttccactttcaggaattctccccgtgaggatatgattcctgccagccttccccccgaagcgtattcgaagcggagccggaatccgtccttcgtggaaatgcccgataccatgcggtaaccggagcggttttcgggaccgtcaaaacggtattgcaacccccggatgtccgtaagcatgtaaccccggccatcgagtgtccatgccagctgttccctgcggtcaaaatgggattctccaagtttcagcgcaggcaggaaggactcccgtccgtcagcatgacggaatgcgaacgccccttcctccaactgccgtattcccagattgtagctgtggtgccaattgtatcccaacggaccgtccacggcggcatcactgtaataggtacgttcccatacgacgggaatcggacccggaagctcgaagtccacattggtgtgatagaccctgcccgtagcagcgtccaccggctcaccgaatatgatgcaagctgttttcttgagaatcctggcaagccggggattcaatcccgccttgtctatcaatccatgcagcagatgggatatttttttcccgagctttgacaatcctttcagccccagcttcatcgccagcgcaaacacatcaatggtaggcggtcctcccacaagcacgggatttcctacggatgtgatggtggagagcatggaagtgggggcaagcagggccttgctcaccttcctgggcttccccttgcggggaatcgtcggtattcccacaatgttgcatgagagtgccggatgtgtgagggaggaacagggcgcaccgtccgccaggacagtggaactgcccatccacatctcggactcggacataccgctgaccaacggggccggatgcaatacaaatgccggcagatgcacgatgccgatacctgcctgcgcaatccactggttatgcaccttgaccgacggagccatgctcttgaggatgttgcacgccactccggccactccatcagccgcaggcggcatggcagccgccatgccggccatgaggtctgccatgaggtcgtacaccttgcctacatgaggcacaggcatgatgggagagggaggggtaacggtaggatgcatgtctatcccgatggacaggtcgccgaacttggcgacaggcatacccggcatggaaggaaggattccgcccagacccgcctgaatctcgtccaaagccgccttggaggctgaaaaaaggtcggcaaagccccgtctgacgctgctgctaccggcggcgtcagctatattcttgaacacatccggcataatgaaactttttgattcttgtttttaaaccgattggtcggtctgctttttgcaaatgtatcatttaaaatcaaaaaagaaaaacattctcctactattttctatcaaaaatcataagacaatccataaaaggcaattgatttcaagtcatgtatcaaaaaaacgtcgtatatttgcatctgttgaagaaaaaaggagagtaaatggactttgaaggagaatataccatacggacggcttccaaccagcagacatacgagccgaataccgtatatccggacgcagtgctaaatatagcccgcgaatcggcttccgtgttccaactgaagcggaaatgggaaaaaactcctccgatgctgaatctgacccctgattttcaacggggactggtatggaagaccaaacagaaaagcgagctgatagaatccatactgatgggtattcctctacctctgatttatgtgaaggaagatgagaagggagtgtatcttattgtagacggcaagcagcgtctgagcaccttgttcagttttatcaacaatgaatttgccttggacaaactcactatcctaaaggacaagaacggttcccgattcgcagatttgactccgttggagcagaataaaatagaggactgttcgcttaccttgcatgtgattaaggcacctaccagtgaccgggttacctttgacttgtttgaccgggtgaaccgtggcgggacgcggcttaacaatcaagagatgcgcaatgcgctctatcagggcaatgccacgaaactgatcaaccggctggccaagaaagaggtattcgttgaagctacagaaggttccattccagacaaccatatgaaagacaggtatctggtactccgttttacggctttttatttgtggcagcagcatatcaccatagacccggacacccatgagcctctggattaccgaagcaatgtagaggattttttggggaaaacgatgcgttttctcaatcagctggagccggaaaacggtttgtttaaagaactggatagccggtttacacgtgccatggagcttgccatacaactgcttccgtcaggcggcttcaggctgccttcgttacccggcaagaaacggccgataaacatggctttctttgagagtttcagttatcttctgtcaagattgaacggagaaggggaacaattccatcgtcaggttcaggatacttatatgcaattaatgtgcaatgatgcctatctggattctctcacacgctccgtggatagcggaaagcagacctataagcgttatgaaattatcaaccgacttattcatgaactgaatttatgctaaacaatctgactgtcaacaattataaatgcctggtggaatgttcgttggaattaaaacctctgaacctgttcgcaggtccgaattcatcgggaaaatctaccgccctgcaagccttgctgattgcttcggataacgtgacggagcaaaaaggcaaacacggtctgaagaaccggagaacagaagcgtcgaatttcaatgatgtaaggaactttgtgaccaatgccaagtcatacgaaatctgtatttcgtatcatggagaagatccgacccggctttgttttactccgggcgatgactcattccaaaccacttttgtggaacaatcggctgacgcatctccgaacctgctgggagttctcggaagcgagaacctgctgtacctgcctgccacacgccccggtggggcatatatgcatcccgttaatcccgattcggaaaacaagctggggcgtaacggggaatttgtgatagactattacgccaagcaccgtctggatacgctggatgccgcattgatcctggctcccggcactcaaaccctggaaggtcaggtgaattatcaactggacaggctgaccggttaccggctggtggtggaaacagtaggaagcaatcattacgtaaaatatgaaacgcgcagcggcaaacagcttctcccttaccatgtcggtaccggagtaagctttatgacggaagtcatcatagcttgtttcgcgaccccgaaaggcggcatggtgattacggagaatccagaaatccatctgcaccccaaggcacaagccgacctgattgatttcatggcaaagatagcgaaagccggtgtgcaaatcatcatagagagccatagcgaccacctgtttaacggtatccggcgcctgatcagtcaggaaaagttggccttgtctgacgttgccgtgtacaacttcagacaagacgggaatggattgacccatgccgaacctgtggaatttaccccacagggaggaatccaatcctatattcccggcatgtttgagcagtttgatattgatttggatgccattttaaagctataagactctatggacggtatcattatcaatgaattgtcattgaacggacagtttttggacagccgggatttctggaaaaacggaatgcctccgtttcacaaggcattgcaggatgccctttcacatggagtgggatatctgttcaaacaaggaagtttttttgctgcgcaagccactcccgacaagactttacacgatttgctgacagcaccggaaacccgtatcatcgatgaagccaggctgtataaaagtacattggcacgtgccatctgtaatccgttttgggatgaagctccccaacaggattccaatgcccaatattcagtaggtgaaaccgatgtatccggcagttcagttgccgaagcagcagcccgctcggtttgtcttctatcatttattagatccaggtatgagaagcatctggttgccgtaaccaaagatgaagaaccaatcgaggttggtaatatctggaaagagaagcaattgtactctatcttgtttgaaaggggtgaactatctctcgaaaagtatattaccattcgtttcagtggaggcaagcttgatttcagccttattgatgacacgctgggtttttcccttattgacggcgagaatcagaacgaatttattgattcattccataaatttgaggagttggactggagtgccattgctacagataatggattggattataaaccgtataacaagaacaagaaaagcaagcgctatttttcggatgacctatggaagaaaggcattaaaaagttcagaatcactcagcggaacaggtgtttcggctatgtggagaatggtgttttttatgtgttgaggtttgatttggaccatgagctaagcgatgttggataatgtttatagccccttggccttatttttataaaaatagaaagctgtgcaaatttataagattggcatcttgcttatctccatatactttcagtcggaaattcaagaattacaaatcctaatacttataaccggcggatttataatccgccgggacgggtcttgtaacttaacaataaaggtagtgttccaataattaatatgtaatacatttgttttgatactacctgctattgtactaaaaaattaagaatactcccaatatgcaacaaaaagattttcaatattttcattttctattttaccatatacatatatacttccactcataaattctgagatgcctctcattccaatttcgttgatttgaaaaatgaaatcatatccatcttttgttacttttccatcattatccaatccccattgtattggtatagcttttcctccaaatttgataacattatttttttctggcccatctctgtcttctcctatttcatataaggaataaatatcatcaatttcgggatgtttaaatttagtacaattactctgttcgcttatttcatgttcaattagtaatactttgcaattaggatatgaattgtattctaaggaagtatcaaaatctggagtaaaaatagagtattgtctttctttatttaatgggctttgcagggttaagtagaaataatatttttccatattagggaaagaaatattatctaatattttaggagcattacccccaacccaactattacagttttctttatattcacatatatcataatataaagcgtcttctctagtctttaatatcttttttatgttcataactattttatgatttacatgttattaaattatttgctttagcatgtgctattgcatcctgtctgagtttctcgactaatgcggttgctttttctttcgcagtttttctatccatgccatcagctattaacccttccattattcctctacgtgttaaagctgcatttttgtttatattttctagtgcagattgtcctttcaagtttttacctttcatcccatatctattttgaagagcggtaattctattgtgtatacccttttctcttaatgcaatagaagggttttctttagaaattaaatcaactcctctatttttacttgtgggaagtttattgttctgttcaagccatgcgtgttgaaggagttcgtgtgctgttaaattgtcaccaatattcgccctactgctaatattgccataagtatcgatgtcaaattctttggctacaagtccaaaaatatcaatacaaagattgacatttttgacatagctataaaatctttcacctgcacttagtccaatagggtcttgacttatataattaccaatttctggttcgtagtacctaaagcggttgtagcataatttagtttctttatccacatactgcccttgatagcggaaaggacaatcaaattctgttcccttatcaatggcaagcacttttccatagatatccagtgtacagtcccatgtcttgtttccttgttcgtcgtacatttggatgggggtacccaagtagtcggacacaatggaatattgtttaccttcttgtatcttagctgtaggaacaaaagttccttcttcaaatacccaagtggtaatgttttcaatcggctctttctgaaaggattctcctttttcatctggttgtatttctgtagttttgtatctccattcatgtataggcacgtttccatcccatatccaacgtgtgaccttcccgaagtattgctttgccgtgcggcgccccaacgcatcataccggaattccaccggccttccgtccggacgtatgaccttcttcagcatgccgttggaagcccattcgtaaagccatcccgttcccgttgccagaaaatggataccccgttccttctccatacgtttgcggtcgaaccttacacccgtttcctgcaaatgcttgaactctctgaaaatgaggttcccctcatcatcgtagtgatagaaacaatccgggtcttccaaaagttttcccccggcaccgtatttgcggtctttcttatccggtgtctcaaagaggttacccacgaagtccggcacacggtaaatcacatccgtttccgaaccttgggtggtttcctgccggataaggaagtcgaaacggtcatagtcgtagcgaatgaccgttcccgtcagctcgttttccttggagagcaggcggttggcgattccccattggtagcggtaagcccctttctctatgccgcctgaccgtaccgacttgcgtatctccctgccgaaacagtcgcgttccgtcttgacagtcacaccgccggagaaacttcgctgcacctccagcccggtattgtcacgtacccaggatgcctgccagctttcacctgcctgcatggtctgcaggttgccttcccggtcataggtatggcggatgtccgctcccagactgctggtgatgcgggtgcagttgccttcgctgtcataggtgcggctgacagtgtattctccctgcctttcctctgtaaccagtcccgtcttcctgtcacgggtgaactccagcaggttctcgctgttcttcgccttgacgagcatgccgtccttgtcatacgtgtagagggagacttccccgtcatactgttcctccttcaggatattgtccagtccatcatactggtattccgtccattttcctccgggacggttcacacgggtgacacgacccgccccgtcgcgctcgtactcacgccgcagaccgtcgaagccggtttccgcaacgacctgtcccagcccgtccagctcgaagaaatagttgtcgcccgcctcgttgccgatgcgccggagctgcaactcgctgttgtagccgaaggtgatgtggtgccgttcctgctcgcggcttttcagtacccccagtgccccataggtgaacctgacctcgcggatgttgtcgctggcatgtaccatgttccccatggcatcgtactcaaaccggtgcacgttgccgtccggctcttccagccgtatcaggttgtccgcacggtcgtaggcataacgggtaacattgcctttcacatccaccgcctgtacaagccttcccctgccgtcgtactcccaccggcggaacagtccgttggggaactgcatcagttccagatcgtacctgtcgttgaacgtgagcgtgtaaacccgtccctgcccgtccgttatggtgcgcagcacgcctccctcgtaggcatatttcacagtctctccgcccggtgtggtccggctgacgacccgatcctgtccgtcatagtcccatgaaagcctttttccacccggagtgtagagcgagacgaggttgcgattgccgtcgtagtccaggaaggtgtcctccccgttctcgtccgtaatccggaccggctggccgaactcgttgtaggcagtcttacgggtatagccttcgggattgaccgtgacctccaactcctgaaagctgttgtattggtgacgggtaattcctccgttggcatccactatcttgtagatgagtttgtcctcaccgtaataatattcggtttcggcattttccccgttacgaatatgggtatatcccttgccgtaacggatgaaatattccatcacgcctccatcgccccatgtatgcacacagcgggcattctcacccttaccctcgtattcccaatggaaggacatacccccttggttggtaagctgtaccagcaggtgtccgccggaatagacgaaatgtttgctgacatccagcgcgtcaatggtttccaccatgtcgccccggtcatcgtaacggtagcggaccagcttcacctcctcaccgtcctgatttacggaaacgcagagcacccgccccgactcgtcggtttccactttcaggaattctccccgtgaggatatgattcctgccagccttccccccgaagcgtattcgaagcggagccggaatccgtccttcgtggaaatgcccgataccatgcggtaaccggagcggttttcaggaccgtcaaaacggtattgcaacccccggatgtccgtaagcaggtaaccccggccatcgagtgtccaagacaactgttccttgcggtcaaaataggaatctccgggtttcagtacgggcaggaaagactcccgtccgtcagcatggcggaatgcgaacgccccttcctccagctgccgtattcccagattgtagctgtggtgccagttgtatcccaacggaccgtccacggcggcatcactgtaataggtacgttcccatacgacgggaatcggccccggaagctcaaagtccacattggtgtgatagaccctgcccgtagcagcgtccaccggctcgccgaaagtcttgcacttgatgggctggagaatgtccgccagcctgttcatgccttttttcctcagcctgtcgattaggttttggaagcggtcgcctatcttcttccacatcttgcccaagcctttcagtccgaacttcatcgccagcgcaaatacatcaatggtaggcggtcctcccacaagcacgggatttcctacggatgtgatggtggagagcatggaagtgggggcaagcagggccttgctcaccttcctgggcttccccttgcggggaatcgtcggtattcccacaatgttgcatgagagtgccggatgtgtgagggaggaacagggcgcaccgtccgccaggacagtggaactgcccatccacatctcggactcggacataccgctgaccaacggggccggatgcaatacaaatgccggcagatgcacgatgccgatacctgcctgcgcaatccactggttatgcaccttgaccgacggagccatgctcttgaggatgttgcacgccactccggccactccatcagccgcaggcggcatggcagccgccatgccggccatgaggtctgccatgaggtcgtacaccttgcctacatgaggcacaggcatgatgggagagggaggggtaacggtaggatgcatgtctatcccgatggacaggtcgccgaacttggcgacaggcatacccggcatggaaggaaggattccgcccagacccgcctgaatctcgtccaaagccgccttggaggctgaaaaaaggtcggcaaagccccgtctgacgctgctgctaccggcggcgtcagctatattcttgaacacatctgacatggtgagaattttttagaatgtgaaaaagagacaaccgggtgttccaaccggcacactccggctgtccctgtaaggacttacctatgcatcctgtgcatagtcgctgttccagtcgttctcgtcatccccttttgtaccttccaacttgatgacaaaactctttgccgggaaataaggagtcaggtgaatgtcgaggaaaatacggtctttctgcttcggatcgcgctcgaaacgaagaatcttgaatttctcaatcaagcgtccgggaccctgtatgctatccaaaaacttgctgatctgaccacgcaaatccctttccgccttgctgttccagttctcaaaggcacggcggttgaggaaatccatcagcactttcgttacccaatcgaacacacggactacggaataggtctgcaatcccaagttgtccccgttgaacaatgtcttggcagagaaagccatcaccttgccgtattccttcaccatcggaatcaggccaatcttctcgatttcggaaatctcgctttttttcaggttgaaagcaaccccgtccacctcgctcatggaaccatacttcttaccggcggtaacctgtgccattaccgtcttgtacacactgccggccaatgccgcagaaggaggaatcagcaagtcttcggtttcgcccagttccgcatagcgtccccgtcctaccagatagttgcaggtcatacatacgttggacttgtacacatcgcctcccgaaagattggaatcaaagaacatttcaatgacatcatccggtttttccagatcagcgaaatccgtgtaaatcatcaccttgttgtcatgcgcaatctttgcccatttttcaacaaccttgttggaacccaaatatcccgggataaccagcagggaatagttggtacgcaagtccaaacggtcataattcgcacgaagctcgttagcaatggcatcgataaagaaggagttgtccaaatcggtaagctggctcatcgaagcgttcacaatggagatattcttgatcttgtcggaatccgtattcttgtagaagagcatgaccgtgcggtaggacttctccaactgcctgacctcttccaccgctttcagctggttctgggatagcagaccggacaccgccgcagacttcttctggcacagttccaccatctcgctgatggatttgttgcctttcaacatatcgacccacatctcaagccgtttttccagttccttgcgctcagccgcccgttcggggtcggaaaggaatatgttccgccgtgccttgcgctccggattcatgttctgtatgccgtccacggaagattccaagacattgaaaccgccaaacttagccagaatctgcaattcagcgttcagatttctggactgcgccacagcctgttgctgctgtacggctgcttctctttgtgtattctgttcgctcataactatcattcattagtggggttagacttctcattgttcttcaaatcgtccaaaatggcagaaatcgcattgacaaacgctccacgtgtctccggattttccagcacccgttgcagcaccttgttggaacgcaacgacttctccatcctgtccgcaaactgcttttccgcattcaggccggacaagaatgaactctgttccgtcattttcctgacagaaaaatcaccgacattgtggaaacggaaattttcctctacgggagcaccgtccgcatccgcgaactcgatatctatttccggccggaaatgtgcaaagacttcgtcaatgttggtcagaccggcaaccacttcgggagccaccggctcatccttcgtcagctgttccaccaataaggttcgattttgtggaatttccgcaataccttcggaagcgtcaatcttcacttcgtttccgccgattccataattaccaagatccatacttattcaattttaaatttaaaatatatattaattaaatctcgctcaactgaaaaaacttccccttcttctggccttcgcctgctgcatatccggattgtccaccagttccttccaatcctccccaatccattcgcagagctgccgttccaatatcccgacatcaatcggagcacgaaccagccttcctgtatgaagagccagatacgccgcataaacgaacgtggaactccgcctgatttcggcagaaaggtagctgcctcctgccagggcaagcaaaaaatattcgaaagcctgttccatctttccatcctcatagcgcaggaaaccacacatgcgatagccttccatgacataataagggtccttttgcatgacggcttttttagccatcatgtcatacaaggcaaccgcttcctcccgttttttcccggctgtcagaatggccgctttcatggaaacagccattttccaataactatatcctgccgtttcaccgccctgcatcgccttttccgcctcccggacggtttcgtcgctgtatttcatgctatgcttatattccctgatagcataacatgcctcggatgcgataagcagagcggaaatccggatattcgtatcctttatttcctgtgcaatatccaacagttttcggatttctctgtccaataatttccaatcctgcttttgtgtagaatccatgacaaccgtaacctgctgcttgaaccgattttcaggtgcaatcaggtcgttaccgctatccgaccgtgccatccggttatgcaaagccgccgccatatcgaactgcgggcgtatgcaaaccacttcccgagactcacccagccggatactcctgttctttttcaagtcaatggttgtcatccggattccctgcgggacaccttctttcagcacattgccgaaccatcctgtccgggaataccccctttcctgttccggaggaaagtacagacagaaaaaggcatcatccaaccgggagatacatgccttgaaacgcaacatctctctccacaagttgcccgccgtatgctcaaccgacacatcaggaatgtattcttccttcagcagcccgtcgtgcctcagagccctgagaatatcatacttctcctcaaccttttctgaaaaccaacccgcatattcctgccagagctgttcagtgtattcctcgtcatcccccctgtacggcgtatcaaaacgaaagaatatgtcatcgaactgccctaccggagaacgttctatttccagaaacctgtccaccaagtccacatcattctgcccgacaatccatacagacagtttccagtccctgttgccgactatgtccgcccagtaatcgactgctttgtaatattcctgtatcacagatgcagatgctcccatagccaaccgaattatgagttaaactttactattcctcccgaaaccgttacgtttccctttccctctatcatcagatttacaccgttgaccgttccgttctttgcagcaacatcgtaatcctttgccgcctcctgtttgatattggtaccgctgctgctaattatactcttttcgctgctgagcaccatacattcgttgccggacagcaatgttacacttttcctgccttcgagagcaatggtatcggcctgcaagcctatcgacttatcatccattacgatgaccgattccgcctcgttggtaagggtaatgcttcttttcgccatgacggtaatggcatccgtgccatccaatatgatcagctgttttcccgtctggtcggtaataacgatgcttcccgtctcatcgtcgaaaacgatggcattgccgctgcgtgtgataatgctcttgaccttgttgtccttgtcccctcctttacctgaaccggaatggaacaccgatcccgtaacataggggcggtccgggttgccatgctcgtagcttaccataacctgatcgccgacttccggaacaaatacccatccgcgattcttggaaaccgcaccacttactcccgcattaggagtctgcaccctgatccaattggttgtcttgccgtttttctgccagtcgaaagccactttcacacgtccctgtcccttgtcgtcgttgttttccttcaccgtagccagttccggcaacgccaacggtcgcttcacatcgggaacaggaatatgtaccgtaccgtccggcacaccgacaaaactattggagtaatgtccgtcacggcgtacctcatgctcaatcccgacaatacggaacttgcctaaaggaggcagtttcatcctgtcagggaaagaaacatcgatgatttcaccaatccttatccggcaagtctttcctatgcctttgatgttcagaagattggcaccagacgcattctttacaatcctcatctgttcgtccagttccgccttgtccgttacatgggggtcggcagccgaggtcgtttttgcagtatatgccttctcagagcagctgtgtgcaatagactgaaggtcgttcatgccatccggtttggcaggcgtatccgcattatgctgtttgttctcctgcgctacataatcgtatcttgcggatttacccggtaccagattggcaaccagacgtacctcctccaaatccatgtcataaacaatcttctccgtattgtccctgtcaggcttgccgaaatacactttcgtcccgtcataatagaaccactccccataaagagccgaaaggcgattcataaagtcaaagacactctcgttatactgcgccatgtagggtatgggcgccgcatacttgggattggaaaccaaattgacctttccatactcctgcgtcacctcctttattatggtagagagggactgatccatccaagaatcgagtgtcctgttgttctcatacagtatcgtagggcttgttccgtgaatggccactccgcctgtctcgcccatgcttccaaccatttccacttgagtgatgattccctcgaagtcataactttcacccgtctgcctatggacaaatgaaatgctggctgtctccccgatgtagccgatgaatttttccggggtctgttggaacgtattgttaggcgacagataattcaccaccacagtgaaggtgtgatgccggttgaaaccctgacggagatgcagtgaaacgaatttctgttcttctcctttcacggttactttagtagccaccaaattcagaaaacttgctcccatactatcttaaactatgattttaaataaataatccgactggtcggtatgttttttggtgccgaaataaccggaattggtatattccggcaccttaaaactttgattaggaaacaaccattagttgttttccggccaatcctgtacaaatgtagcctcgtccatcttcacggtctgtgcagaaatggcgaacttgattgtcatcggataagggttagccacattcagtgcctcttcgtaatccaccacataaccattttcgaacaccaattccttcattttggcatcttcatccgctttcttgaagacgatgtttccgtttacgggctggtactgcttgaacatcttatccagcacaatggtatcgggagttgattcgatttccacatagattgtgccaccataaatgtcagatgccggacggcctttggggtccacatcacgattgaacttaactctccaggtcagtacatcaaactctcttgagtccgaaaacttaaatgacgctttaaatgccatattctcaaagttttaaattaaaaaataagttgattttgaaatatccggtcaaaggaggcctgctacagtcctatctttgtccttcaatttctgcgcccaacaatatatggcattttctgaaaactacaaagaacttttgatgattttttcttgtttttgccgaaaatatgcccataagcataaaaaaaacactgccaacaatagccgaattattttttttgccttatatttgcaatgttctcctgcgcaatttttaaatcttacgattatggaaacaggagttggtttcatcaatcttgatgattctgtaaaaattgcgcttaacatagcacttgcagtggctcgtgaaaatgcgaacgagtgttatacaccctcgcatttgttgaaggctctacttcataaagatgtagggttaagagattttataataagtataggcaaggatttaggctatctggaggaatgggcggacgtgtatatcgaacaatgcccgaaatccacccagttgtccgaaatcaagccttcggaacggattgacgccgttttccgtgccgcagacgatgcacgaatccagttcgggctgttcgacatcaatcccatctgtgtgctattggcactggcaaagcccggtgtcgctttttccagcgaccagctcaggtctttccccattctggaaaaggatatccattccatatatataggtaacgggcagccggcatgtccttctgccactacggagaagtcctatgccccgacttccgcctcatcctccttcttgggcaaatactgtgtggatctaaccgaagatgcggccaacaagctgcatccggtcatcaaccgcgaccgtgaaaaccgtatggtcatggagatactgggaagccggagcaagtccaatgtcctgattgtcggtgatgccggagtaggaaagacagcactggtttacggacttgcctgggagatagtcagccataaagtgccctcgtttctggaagaaacccgtgtatttgaactggacaacgcctccctgattgcgggagccacctacaagggggaaatcgaggaccgcctgaaaaacatcctgaaagaattgcggaatatcgacaatgcaatcctgtttattgacgaaatccatgtattgctggacaaccgacaaggaaataccggtgcgggaaatgtattgaaatccgaactgtcgcacggcgacctgaccgtcatcggcgccaccaccattgacgaataccgcaaaatcatcgagccggaccatgctttcagccgccgtttcgaggtcatacaggtaagcgaaccggacataaagtccgctatccagatgctacactccgtgcagaaacaatacgtggactaccatcatgtaagaatcagcaacgaagccgtagccgaatgtgtccgtcttgccaaacggtatatcaaagaccgccgtctgcctgattccgccatcggtctgctggacatgacgctctccgccatcaagatggtcaatgaaacaggaaagaagaatgtggagaccctgctatccgggctggatgaaatagaaaaggacgaaaaggaccttcaggaaaagaccgaagaactgaaaacgctgcttttcgtaatgcacaacaaattaagccccatccttttaggagtcatacccgatgaagcggatatccatgaattgcaggagtatgaagaactgaccggctatctgagaaacgcattgaacgtcctcctccaatttgcagagaagaaaatagaggaggtgggtatctatgaggtagccgccgttgtcgccagcaagacaggcatccctatcggcaagatacagtcgcaggaaaaggaacggctactcaatatggaagattatctgaggcgacgcgtcgtcggacaggaccaggccctgaagacattgacggatgccatcctggaatcccgtagcggcatgaacaagccgggacagcccatcggctccttcttcctgctgggacccaccggtaccggcaagaccgaacttgccaaagcactggcggaagccctgttcaatgacgagaaatccatgatccgtttcgacatgtccgagttcaaggaagaacactccgccgccctgctgtacggagcgcctccgggatatgtgggatatgaggaaggcggcatgctggtcaataaaatacggcaacagccatacgccgttgtcctttttgatgaaatagagaaagcgcacccgtccgtatatgacattttcctgcaaatcatggacgagggaaaactgcatgaccgtctgggcaaggaaggggatttctccaactccatcgtgctgttcacatccaatgtaggaagcgagtggctgaccaagcaacttgagtccggcaatgttccgtccaccacccagatcatggaggtgatggggcagtatttccgtccggagtttctggcacgcctgtctgaaatcgttccgttctcccccatccgcgaagacatactcctgaaaatattcgacatacagttcaacggagtcagaaaacttctggacaagcagggtatcggcataaccatcaccgatgatgcccgtaagatgcttgcacacaaaggattcacacccaaatacggtgcccgccaagtggccggtgtaatccgtaactatctgcgcagaccgatttcacggcttatcatcaacgaggagctgggcaaaggaaaaagtctggaggtaggtctggacgaacagaatgaattaacctggaatattcaccaataatcaagtacactatgtttggatataccgtattcttaaagataggcaacctggctgcctcctcactgaccgacatgtacaaggacagctaccagctcatcggttgcgaattcggatttgcccaagggatagatatcaaaggacaggcacagaccgaggtaaaaggcggcacgttttatgtaacctaccctcatcttcccaaccgtgacatgatccagtggatgctggatgcccgtaaataccagagcggagccatcgtagtccatgacaaccaaggctccacactcgaaaagatactctttgagaaagcgacctgtgtggatatggaaatcagctatatccggcagggcaaaagctatattgcgaccaaactgaccgtacaggcacagaaactggcattcggtacagaagagtttgaaaatcagtgggtgttttaaaaacagcagcgttatgggactttttaattttccgcaagtggacagcaacgtgaatgtcatattcagcgttgacggcgacgaatatgcagtggaacagttcaaaataggttttcaccagccagtagataacctaaagaaccaaccggaaggcgaagtgcgtggaggacgaatcatgataaccctttcgcagacggtgaaaagcaacatctacggatgggctgtgaaaccgtgggtgaaaaagaacggggcagttctgttcaagactggaacgtccggaatcgtgtttgaggtggcgtttacgaatgcatattgtgtcaatctgagacgggttatagaggctttgggacaaggattgtcaacaagtctgattctatctccagagagtgtaagcgtgaatggtattgaatttgataatcggtgggtaaagtaatgggcgatattctgaataatagaataataactctagaggattttgagtttctaaaatcaataggagttccatatacaggttatgtcaagggtattggatatacctgtcctgtgtatatgccagcacaggctttcaggattacagatggtaatgtgcaatggagcagttgtgagttacaccctcttttttatcaagctatagatgatagtccagagcgcatctttttgagcatgggatacactactgaagatataattgaaagaataacttatgataatggtaatggaaccataactgttgctgtgggaaaccggtctgtaacttttccaaaagaacaaggtaaggttaatgtgtatttgaatcaggaaggtggtaattattttatttatatagaagctacagattcaaaaggaaatattcttttgagtgattcaaaaacgattcgttcttatatacatgagaaaggaattaaacaagattttgacattacagatggagtgggctttaataaggaaattcttgataatattaatacaggaattggagcttttggtattgggttaggtgcgaaaactgaaataatagattatggaataagaagttttcatggttattcttggaagcagtttaattcactcgataaaaagcagcagttacttaaagaggctcaagcaattggaaaaaccgggactaaatatttaaaaggtatgaaaatgcttggaaactggagttcgtatgcttctgctggttattctgtttccttaatatttgtagaagatggaagaacattggaaaagaaatttgttaaagcagcattagatgtgggatttacctatataggtatattgggaccatggggatttgctattagttctatttactatttggtggatacagctacagatggctttggatattttaatgaataaagttatgcataaaatcttagaatatttgttttataaaattcaagtattgactcgatatatggacacaagtatgtatttaaatatacatgttccatttattatgtctacagtcttattattctatttggcagatattgcaattatatactattatattataatgggatattcaccacaaaaaaatccaagtaatgtgtttttggtggttttcattattatgattttattatggagtagtctctatttttattatcggtataaacatagaaatgaacgaattatggaaagaaaaatttatgaacatagttctaatgtatgggcatatcttttcatatttactccttttattgtattattaggatttgctttattttttagggtgtccagttctacgctctcgtttttggtattgatttaacaacttaagatattgattattaactataacactattgtttttaggtacaattttaacatacaaaaaagcatagctaattcattgaatcaatatattttaaagagatatgattatcagcactttggaacttgcatcatatcttttttgaactaaaagctggaacatcaaactggacaccctatttatttttttaatttcattgtttatgaaagagtataaggtattaataatttatacaatctccaatgatcaatcaaaaaagtcatttgaagaagaactggagagatacggtctggaacgggtcgggacgcaagatatctttgcccttcccttagaggaataccggacaaaggtacaggcattcaaagcctacctgcgagcctatgtacgcaagcatctggacagccaagacacggtactgttcgttgaatcacgcatgaacgaggaacggaccctgaccgccatgctgcaaaccaatctgatgagtgaagaagaataaaataacataaggatatgagtgcacaatcgtatatcaagttctggacagccgaaccctcggagcatgaagaagtgcaggcatacgacctgctgggctacgagtatgacttccggaaagaaaccactcctaacggaaaggtaaccgggaagacctacggcggtaaaatacgggtaagcattgccggatttcctacagaggaactcttggaatggatgttcaattcaagaatcctgaaggacggagaggtgatgaacacttccggcctgcccggtactcccaaagagatcatccgtttcaagggagcaaaatgccttgatttcaatgtgcattcaacaaccaaagagagccgtacctcactattcatccacttccgggaaatggagaccggcgattcgtgtcacttaaacttataatcatgaactggttcacttcattgttcagaaacaaaaaatcctcaatgccggatgaccgctacgtgatgcggctgtccgtctgccatgagacatacagcattgaagagttcgacctgcaattcaagcggaatacagaccgtgacggattgcctgaaggtgaggcatacggcggattcgtcacctgtaccctcagcgggatgccgggtgacgagctgttgagatgggccgcatacagccactcccatgaagacggcgaaatacggatctacctgaaggagcaacccgaccaacaagcggcatttgccttgcgctttgtggaagggaactgcatccgtctgcaacgcaaggttgaccgtatctccaattccagcagcatcgtccttctgtttgccgcaagaacactaaaattcatagacgaagaatttgaaaacgaatggcactgacaagtatggaaacaaagttttgcaaattgcccctggattttgaagccttgctcagcgaggatgtggaaaacagccgtcttgcatcctgctcggaaatcgagtccatcgaccagtttatcgaactgctgatcagtacggctcccggcgaacatgcctttgacaaggagttcggctgtgagatcttttttctcgactttgaaagcattgtctcacacacccgttgggaaggacaattctcggaatacataaccaaggcaattacccggcacgagaagcggcttacgggtgtaaatgtacgtgtcatcattgatgacaccacccgacaggacaatgtatttgatgctcccgccgtaaagaaacgtgtacaagtatatgtatatggaaccctggtacataccggagaaaaacggtgtttctattatgtaatctatttaggaccgatttcaacccgatgaaaggattatgagtacagaaaaatacaataaagagcaaatcagaaaccgtatgctgaaatacgctgcggctttctggggaataaaaaaggcggaaaacttcgacccggttgtcaagctcctgctggaagcattgtccaacgagatatatatgctgggagaggattttaccgccatcgagacaaggctgctggaaaagaccgcccgaatccttaccccggacatccttacctcaccctttcccgcacacggcatcgtacacgcctatcccatagaaccgtgttacctgataacccgggaatcgggcatgtattacgagagcgactcgcttacccggaagctatcgaccggaagcgtatcgttttatcccgcctgcgataccctgctgcacaaagccgacgtgaaatatatggtctgcgacgaccttctctaccggatagcccctaccttggagaagaccatgattgcccgtgcagagacaaggatgtctccgcgtaccgtctggttaggaatggcggtggatgaatccatttccgaccttgaagacttttcgttctatctagattttcccaaccttacggagagctatgaatatctgctcctgctcccctgtacggaatggtccgtagaagggaagacagtcgtgatggaagggggaatccatgaaaagacaaccatacagaaagaaccaacccgtgcctttttccaagactatgacgtaatgtccgtcatagacaaggaagtcatggatatttacagcaaacattttctgaaggtatcgcagtcctttccactcgacggttcctgcaggaaaaaccttccggacaccctgcggtcctgtttcaaagaggccgttctggagaagatgcaggacaagctggtatgggtgaagatacagttccccgcccatttcacaacggaagtccttgaagaacttcatgccggcatcaacatcgtgcctgtagagaacaagacgcttcacgaacagacgaccacccttgaggaaactttcagggtgatacccttgcgcacgggcagctacgaatcccttctgtccgtacacagcgtgaaggattctgacggaaagaactaccatgaactcctctattccgcaaaggattccacggaaagctatggaacctactccatccgcaaaggaggatgcgagcgtttcgactcccgttccgccaaggagctgctcggctatctgtccgacctgctggatgacgagacccatgccttcaatgccgtatcaagcatcaagctacaggcacttaccatccagatggagcagctgatggcgcaaatgaaacagacagcggacaacatgaacgagttcagggaaacaccttattaccttatgattgacgaattgtccggcaaggggcagattaccgtcaaatactggacaaccaactgtgaggtaggaaaccggatacaggcaggcgtaaacctgtcccccaatgccaccacttacctggacccgaagacactggctctggtcagtaccacctacggcgggaaacaagccccccaaaacagagaacggattgacatctacaaatacgccttcatttcgcacggccgtgtcctgacacagaacgacatagccagcttctgcaaaaaagaactcggagaactgctggtgcggacagaaatccggaacggggtggaaatcagcccgatgccgcacgaaggactgatccgaaccaaagaagtccatctgattcttggaacgaaactggatgagccttcgcaggaaaaacagataaaagacaatctgcgtaccaaactctcggcctgttcgccggacacattcaactaccggatattcatagaatacaataaagcataaataccatacttatgaacccagttacccaacatctcatttcatcgtacctgctgatgccgctgctgaccgtgattttcggaatcgcggcctattttatcgcacgcaagaacaaactgctcaacaacaaaaaactgattgcgtatctgctgctgtgcggcataatccttgccctgcccggcctgtccggattcatggactataacttcatgccttatgcctacatcctgctggtcatcctgtactggactgccggatattacaaccggctcatccttcgcaaagtgttcgcgtcaagcaaggaaatgccttctttcggcatccaatgcctgctgacggttacggtcatgcttctgggagccggactcttttccgtagtgttcaacctctgcaacgaactccagtacggcatctgggcctccacctgcctgctgccctttgcatttccactcctgtattcccaaacggtgaacagctatttcgacatacccattgaaatttataaagtatggaaatattcggaggaatatgactcggataccttgtacatcaaccgtgaacggagcatcgtaatggatgtggacatattccgcagggtggatgaccccgcatcggaacgcataaccggcaaggcatccgaggatgtcatcttcgggcagtggttccagcgcatgattgacgactgcaacctcaaatcaccgtcttcgcccatcgtatataagaatgaaggaggagcctattacgaatgggtattctataccaaaccgtcctttttcaagagacggcgctatatagaccccgacgttacacttgccggcaacaagctgaaaagacacgatgtaatcatagccaagcgtgtggcaaacgaacttataaagtataacgaatattaaatagaaacattatgataggaaaacagagccaaaagaaaaaatatccgctggtaaactgggcggacggaatgcccgtcaacaaagggcatttcacccaacaggaagaccactttacggaccggttgtgcgaataccagtcgtttcatctgaaccgcaatacctacggactcctgccattcaagaaaggagaaccggtttccggcgatttcagcattacggaactcgttacaggcaccttggaagtccgattgaaacgttgccacgcccttacttccggaggttacctgatagattatgatgccggtgaggatgacgaactcaccgccagtttccatatccctacagaagaggaagaagaaaaggacaagcggtgggatgtcatactgatggcagaccctttcgagcatcttccttcgggtattccgaacgagaaggaaatcagtccacgccagcccaatgccttacccaaatatgcgttgagcgtgctgccgagcggacagaccgacggaagcgagctgggaagacactttctgctgatcggccgcctgcgcaagaacggaaaccgctgtgaagtggacggaaacttcatcccgccatgcacaagcatgtccagccatccggacctgaaaggctactataccaaattcgggcaactcgtggattccatagaaaaagcttcgtttgacatccttgccaaagtggagaatgcagaaaaacagaccagcctggccaccaacatcggtatgctgtgccgccatgtcatgctgttcatatccgatatctacttctccttccgcaacgaggggcaatactattcaccgctacacttcctgaatgtattctccacattggctcaccgcctgtatgtatgcctgagtttcatggacaaggaagacaaggaggacctgctgaaatacttcaacgaatggaacggcatcactcccggtgcctacgaaggcctgctgagggaaaattgcgggctgctgtacaaccaccacaatatccgccaactgatggttacggcggaacgtttcctatacctgttcaatgacctgtggacaaccctcagccgtctggaatacatcggcaagcacaaggaaaacatcgttgtcgccgaacgctccagacaaccgaaagaatcgagcgagtcacgctggaacatactggactaatcccctataagcgaacggacatgacggaagaacaagataaaatagtacggtttgacgaacattcccattcattcaacctgccggataccgacttcaaggcggaagtggtggccagcggactgaaagaggccgggtatgatgcagagcgtaccctcatattcagacggggagacatccggcgcggattctcgaaagacatccatgacatccacccggaatattcccattatgacctgacggattacctgtatctttatgtgaacaggagaagcctttatgacgagctgcccgaaggcatattccacaagaacctttaccagtccgagaaaatatcgaaggaacaggtgctggacgaaatccgcatccaccgcgaagaggaatttttcgcccgccgtttcttcaagcctttcgaaatctccctggaccatatgctggtagccttccagaataaggaacgccgcattgacgagatgaacgtacatccggatttcgtaagcatcttttccggtcaatggcccgtactggaactgctgccgacccatctggcggtcatgcttatccatatgctggcctatatggaacagattacagcgagcctctccaaagccggcgagtgcatgaccattctgaccggtgtgcccgtgcatatcaagagaggagacaaatgcgtggtggaagtggattcctgccttattcccaaattgggaagctgcattctgggagacgacatggttctgggaaacagttttgccgacggcacctaccagatgctggtagaaatcggtccactgtccgcccgacggatggagagcttctttcccggcgctgccgacagtaaaatactgaatgcgctgacagaactgttccttccctcggacaaggagatacagatccgctacatcatccagcaggaagatgcccggttcaggctgggaaccccaaccgaacaaggcgcctatctgggtatcagcacctatttatgaatataaaacatcatcctatatgaaaccgaaaaacaacacagaagtaaggaaagcctatctgagattcgcgggctatctgacatgctgcaccatccttgcggtaagcatctttgcctgtttcctgaaaacctccggcatagaagtaaagcgaatcacggagcaggcactggaatatgaccatatctatgccaaagagctgtccctgtcgaacagcatggactccatctaccagtacatgaaactgatgaacacttcaccgcaaataaacgacaagctcctgcaaagcgttgtcagtacgcgcaagatgaacctgctcaaatatgtccaaggcatggacaccaaagattgcaggctttacaggcagctgctggaaaacctcaacatcttcctcggggtaaaagactccatccgtctgctgaatatccaggaagagatggtgaagaaagacctgatgcagtgcatccaagacaactggaaaacaaggcgtaacctgaatgtgggttccggcggcaacaaacaataaaacggaaagccatggacaacaacagaaagacaatgaacaaacgggaaatattcatgggacatgcctatgtattcctgttctttttcctgacaaccgtagcgtgttgtctggtaatcttcatgtggaactcagatttcaagatgtttgaacagaaagagttcgtaaagatcaagatgaaccgcatcaaggatttccagcaggaacaagcggaaagccagttgccggtggactccctgttccgtaaaatagaaacatttgaaccgggcgtttacgcccagtatgaagaagacgacatccattatctgataaacaacctgcggaacacatacgaaaggaacagctgggacaagcgatacaagctgttcatgcacattgccgacttttatgccatgtggctgtccgacaggaaacagctatggagtatcggacaaaacataagtctgttcaaagccaatctggaggagtgcgagataggcttgcagaaaaaggaggaagacttgcgctcaggaactaaaaacaaatgacatgggaaaaatttataccagaaagattctgttcgtaatcgcagccatgctgctgtgcatccttgtcgccatactgatccggctgttcttttccagccgcaccgtgcgtatgacactgacccccatagaggtggaaaccggagaaacggtccattatgcagacagcacccgcaacgcacgctcctggctttgggaattcggcaacggggacatatcacacgaacggagcggagaatacgtgttcaagaaaccgggacgctaccaagtgcgccttcaagtggacggaggactggaaaggaaacagatcatcacagtacacaggagccgggatgattacggaagcgacgagcttgtcaggatgaaagcaccggcaaccgcctttcaaggagaaatcgtatctttcaaaggatacggtccgtcgaaagaatggcgctggcagttcggagaatccggaattgtcgattcgcgggagcagaatccactctacgcctatacagaacccggcatatacgaggttctgctgactacggagaatacccaatatccggtccggcacaccattgaaatccttccccaatatacggagaacgactcgacagacgtgcttgtcatcatcggcaatgacatccgtgaacacttgcaagccatcgtggacggcaagccgttcaatacccattacaattatatcctgaagaaatacctttgcggaaatccggacatagcggtaaccgtcaacaacagcaagaagaatgatttctattcctattgccaaggactgaaaatcatagcacgcaggaaaacccttatagacgaggtgttcgtcgatatgggagacaacctgagcaacgaatgtgtgatgcagctgatggtaacacagcacgaacgcttttccgaacaaaaaaacaaatgaggcatgaaaaagaattgcatatcgacactcataaaaggaggatggatttgcgggtgcatcatctgtatggcatcctgcggaccggtacaccgttttatgcggataaagaatgtaccccgtgaatatatgcgaaactattccatagaaggggtaaaggctccccgcagccagacactgcccaagcataccccgtggattgtctttgccaatgaagcaggaacatcctatctgagtccgagcggaaagaacgagatgcagtctgtgaaatacatggacgcatttctcgtcatcaagcgaaaaggagactggctcagagtcattcaatacgacccagccattctgaaaaacgggaaactgaaagaatggaaacaggcaaaatactgcggatggatcaaccaaaacgacctgttgctgacccggagcggctttaccgacattgttaccggattcaaaaacaaacaggtggtcatgctgaacgacagcgtggcattggccaccccaaaaacgtattttgccaacgactccgtaaaactgttcaaaaatacagacctgacacaagaggctggcaagattccattttacagtgtcgtatatccttatcaaatatcggaagacaaaggatgcaccctcgtggcagacaagccgcagcttgacgcagacagcatagggcatgctgtcatcggatggatagacgaacgcctgctgaccgcccccgaacagcagctccatatagacataacctcgctgccggacagcacgcttgtttttaaagacagggaacggaaagacaccttgccgctatcatccaacgacctgaagcggaaactgcaactttcggccagccagcctgctatccgctacagcccggtactgtcctaccggaacaatgacacgagcttctgcttcaaaacccggcttccgatgccggtcatcgacaaacgggaaagctatgtgctgaatgtcaacggcaatccaatctattacgggactttcaaaaacaagatagagaaggacctgcaaaaaataaacctcatgtttgtcctggaaggaaaagagaacaccatccaacggtttccagccgtggtgaatgccatccaaggactgcaatcgcaactggtgaatgacgacagcttttctttcaggttcggtgccgtgcttaccttcaacgaaccggacagccggaaagaccccatctgcaaactgactcccgactacatggagctgcttgatttcctttccgccaaagcacgtaatgccgagcaactgaaacctacatacggacgattcggcagctggtccggccttcggatcggagtggagcaattcaacaaatgtccagatgaaaccaatatcctggttgtcatcggcgataaagggttcaacagcgagtgggcagactccaccttggtgaacaagctggtaaaaaacaactgccgcatgatcggcttccagctctacggaggagaaccggataacttcaacaacttcgtgctgcaaatcgggaacatgatagattgctcggcaccacgcatcagccggaaaaaacgggaactgattgtatatcccgaacaaatcagaaatgaaaacgaatatgcggaggtgaaccataacacctattgtctggactttccaaatcggagcatgacacagggatggctggtgtttccgcaaaagaacgaatcgctggaactggaaggactgaccaccgccgtggattccatgctgatacaagtgaagtttgacaataccctgctgagcaacagtctggcaagggcattcgacgaagtgggtacacaccgatataggacagattcgacaatgacagcttattaccatatccgccagtcgggggtacaccccatgctatccgtacttccggataccgaacctgcctggagcctgcctgcacagccaatcgtactgccggactcgctgtcctccacactggactattatctgcttgtcaacgaagaggagttcaaacggttgagaaagtatgtggaagcaccctccaagctgatcgttgactataaatacgaagcggtcaaaaagaaaaagcaagcgaaggtggatatctgcgactgtccggacgactacctacaggcagatgccgaagaatctaccgtacgtgtaaagacggacagcctgaacgcaccggaatatgcctcaacccgccgtgcaaggagaaaactggtcagacatttcctttcagagcgcaacagggacagatattgcaaggtagggagaaagactttcctgagaatgcccctatcagaggtcttgcaaaggtttacctcctgcccgaccgactatcctttctttgaagtttaccgtgtcaaggacttgcggaaaaagaaaatgattacggatgcggagctggacatgctgattgaatatttcaaggaaaagaaaaaactgctggacgaagccgccggcaagccgttccagtccaacgggcagacatactattggatcagccgtgacctattaccatagtcattcacctgaaactgtattatcatgatttatgaaactattctgaaaataagaggaatggaggtgccgatactctattataactatcggtgccacatccggcactatgatgacccgaatctgagaaaaatcatacaactccacatccaagtatgcgaggaaatcggcaatcgggagtgtctgccggtcgagggagacctgattacgcttgcgtttgagtgcaagggtgaagaacagttcttctatgactggctgaacgaaggagccatgcacaacggggaaatccatttcatctacaacgaagtggagattgcggacattttccggttctgggactgcttctgtgtgaaaatagaagagtatatgagtgtaggaaactctccgatgatgatggtgctgtatttgtcaccggggattatcaaaaggaataatctggaggttagggagaaggtgtggaaggtgtcggatgtttcaattatatatcaaacttctaccgagaggaaagatgattcggttagcaatgattcaaataagaaaagtctttctgtaatttttgtaaaacctccatttcaattaaagaagaaatttcaaaaagatccattttatgaaattgaaatgaggaagcaattgcaaatgcagcaggatggaataaataatatgactatatttgagtggctgaaaaatagggagaattttaaaaaatatgggcgtaatcctaaatctaagaaaattcaagaagattttagggatagatataggaatgctaaaattgatgagtatcttttattgtatgaagatatggatattaaggctatagaggcaatggttgactcagaattggaaggcttagcagcattacataatcctgatcagatagcaggaggatatgttgatgtggtgactcaaatgggaaataaaagaataaattcgtccattgggtcacaatggggaagtatagaaaaaggtcgttctcttaatattgaaaatgaattgttaaaattaataacagaccctcctcctataacagaagaggagcagaaaaaaataaagatgaatgtaaatttagttgaaaacttagaaattgttaagtagtatgtttgagaaatttttagaaagaagtggaaattctataaaattggaagagtttagtgaggattatatccgacaatacaataatttggtttcggaaaaactaatttctttttggagaatagctggtattggcatttattgtaatggcttgtttagaactattataccgaatgactatcagtatattatagaggaatgttatcctatgtatgattatgaaacagtgactccatttatgataactgtttttggagatatttttgcttatgttaagaatcatgtaattggagattacgtcgtttttattaatataaggtatggaacttttaaaattctatcagaaaatattgacatattgttaaatatagtaattttcaataagagttgtcttgaaaattggtttttattgaatgaatataatacaataaaggaagtgaaggcgatgcctaagatagatgaatgttatggctatgttcctgctttagttgcaggtggaaaggattgtattgataatattcaaatagtaaagattgctccttatattgatacggttattcaattaatgggcgatttaaaaagaattagataatatcaaatcaacacatatgttacagaatgtttttaaggttgatacaatagtttatgtttcaattaatttaaattatgattatagtatatcttatatggaaaatatagcccggaacttcacgaagaagtatccaagctatcttatccataagaaaagcgaagacaagataaaagcctttctgaccgacagggtgaagaccaaagtggaaacctttgtgaatgcagaggcaaagaacgtggcagtaaccgaggtgcgagaaatagcagacctgatagcggaatatgaaggtgcagaaagttcttcatcttttggaccccatcctacggattccccctctttaggaaacaccggagtggagcttgccatgagtgtagacacaggcgcatcggacatccgtcctgtcaatgtagccaaacccacgggggcaacaggaaaacccaagataatgaaaagaagtgtcatccgtgtaaccatggaactggaagtgcagatggaaaccaaacaatacttgcaattcctgcaacagattccagacctgttcagcctgcatgaattccccaatttgagatgccgcgtgatatgcaaccagaaaaaggcaacaatcaacgaagagccagcaccggttgaagtgaaggttttggatgacagaaaataccagcggtggtttgttgcctttacactgttgatggtatgctgcatgggcggaatcatagccctgttcttttccattccgaacctgtacaaacaggacatccacttcctgcggaacgatacgattcatcaggagttttccatttccaacagccgtattgacttgaaggatgtaagcctgacgaatcatggcgggaaagacacacttgtcatcaaggataaaaagataatcatagccaaataaaaagcaatggaaaattcgattcagatacaagggataagaaacatgctatcccatagcggatgcccggaagacctgctggaaagttacctgcaattcctacaaaccgaaggccaacaggtgcagattgtcagaggagaagtctttatgatgtttgaaaaggaagcgcaataccgcaagagaaggaatgaaaagatgaaaggaaccgtaactttctgcaaaaacacgaagaacgatacaggggaatacaatacaggagtgttcatcggaatggaatttatccaatgctgcttcaaccatgggattcctgcacgggtgctgaatgtgcggagagtacatggggaagtgacggagattgtcgtggagttcgggaagtagatgaaaggaatacccctattgcagagctccgacctaataatatgtgggggaaattgatgggaaaatccccccacacacttcatcttgatatttaatgagaggaaggattactccttcttggatgttttttcattatccagccccaatcgcttgcataactccggatcgtttttgatacggcccatctcttcgttgatgatggcctgcgcgtccgacttgatctggtcgtagttacgctgaatctgctgcatcatgatgtcattaccgtccttgtccttgaattcgttgatgaaagggattttcctgtaggccttttcttccgcactgaccgccgcatggtctacaacaatttcggcatggaatattttctgttctatcttctcgccaaaattatccgccacagccccgacaaacgtaccttgcgacagattggcaatcttggatgccgggataagcgagtcaagctgcgtgttgatggaagtggaaacatcctgacggttgatggaaacggactgacgctgctggagcaccttgccgaagcgttcagaaagtgtctttgcggtttctccgaccacctgcccgctgaatatatttcctaccgtgttctgaataaccttggactccttttcaccataatcgcgggtcagctggctgaaatcctgaaaacccaaaagtacgcccaccttgttgcttcgtgccgttgcaatcagattgtcaagcccccggaaataaatggtgggaagctcatcgatgattacggcacatttgagctgtcttttcttgttgataagtttgacaatacgggaattatatagtccgagtgcagccgaatagatgttctgcctgtccggattgttgccgacacaaagtaatttgggttctttcggattgttgatatccaacgaaaaatcatttcctgtcatcacccagtatagttgtggggaaatcatacgcgtaagggggatttttgccgaagcaatctggccctggagctgatcctgcgcccctcctttccatgcatccatgaaaggagaaaggtagttttccaactccggataggaagtcaggacggtgaacaggtccgaataaggcttgttcagtaattccaccgcatgcgggaacgtacaataaatcccgttcttgtaaatcttcaaataccagattattgcagcaagcagaatgatgggggattctacaaaaaagtcaccctgcttttcaatccaggtgcgattgaggttgagcattatcgtatagctcgcctcgtacgcatcggaaatgtccgtcataaattccggattgataggattgcatcggtgagacctgcgcggatcgtcgaaatttatgacatagaaccggggcttgacctcgtacttgtccatattcttcaacaaagaattataggctatggtggacaggtcatcaaacttgtaatcgtagatgtaaatcgcaaagcccttggctataagctggcgtatgtaactgttgactatcgcataggacttgccgctacctggtgtcccgataaccatgcaggcacggaaaatattgacaatattgacaaatccgttattccagcgttttttataatagaatctcgttgggagatttaccgaatactcattctccatcagtcgggtttcctgcatgaaactctcattttccatattgaacacatcttccatgaggttgtgcctgtaaaggcggctcatccatagccccgacatcagcagggcgagatagcctgccgtaagagtaaaaatatagaatgcggtatttgccgcgtgcggcaatggcagctcaagcaaccaccagtttagaaagaacagtgcgcatcctgccaccagcgccgcataaattttaggccaggttatcttttcacctttgactccgtgcgtacccagacaggaaacggccagcagaagcactgccaacagtttgctccagagaatgcagttgaaaatcccggtcgtattattgaaattcaccagaatcctgtccatcaccgcaaggttcaagtgccacgtggtgatactcggataacaatacacatagacgtgtaccaccaaaagaaaaatactcacggccctgccaaattccatgatcttggcaagcgccctcaaatcgtcttcctgctgcataagaattgtatataaatgggttgatacttgttttgtctaaatgccacgtttgcgtccggtcttcttctttttcttcatgcggcgtgcaaaggcttcctcctcatagtcacgcgggttggtttccatcgaaagtatgcccgccgccagttcgagcgtgctgccggattcgtggcggtgatgctgccgaagttctgtagcggaatgtccgccccgttccttttcgggtatgttttccaaccatttgaaatagtcgttgaacacattggcggaaaactccttgcccatgcgtgaaccgttgaacacttcccgtcggtcgtggtcaatgaaggtgacaccgtagatacgtccccgctcattctcacggaacaccacatcgatatttttttgccccagcagttccacaaaccgtttccgtgaatccgcctgccgcaaggcacgggcgatgtccgcctgtatggagggtgcccattttccctctttgagagctttcagattcatcaacatccgcttttccaacagttcattcccgaagcgttttccgaaacgtgaactcttgaacggcggactgaccaccttgccggtatcatccgtggcagaatagacaatgccggtgtagggtatgccggtgtactcccccctgacctgtttcgcctcgatgttgagtgtggaaagcagtgcgctgtattccccgaaagtctggaaacggtagctttccagtacggctttaagggtgttgcctacctgatggcggacatcccccaaggaagcatccaccttttttagttccgctttcggattccgcctttccgtgtccgctccgttgcgcaagccgaaatccgtttccagttcccgacaggcggtcatggaacggcggtgctcgtaggcgtcactgatcttttttccctgtccgtctacacagacactgacgatatgaatgtgggcattatgggtatcggcatgtttgtaggctatgtacggctgattcccatagcccattttctgcatataccgttccgccaactctaccaattgcccatcagtcagctggtcttccggtgccggagaaagggagatatgcaggacgggcttctccgtattgcggtttgccagcaggtagttctcaaaagagagcaatgccagacgtatgtcctcactgggcaatcccaatctgtcggaaatcatgcggttgcccgaaagaatctcggcggtacctgccgttaccttgtcgtagttataggcaagtgctccgtaaaggcttgttccgtgacttatttttgcaaccatttccgctcgtattcctgggttagcaccatgacttttttacatacaagcatcagttcgatgctcagtttctccaacctgtagagcaatgccatcgcacgtttttccccgaaattgttcttcaaggtccggacaacctgattgtagttgtttccgacggcctgaaactgcctgtggaattcggtcagtttgatgtagtagtccattgtcgccttgtcgattttcacaactttaatctgtcccgaaaagatggatttcttgatgaacagcgtgcggtccccggctcccgaatccgccagcaatttttcaaatcttgtgttctcctcggcgttcaggcggaagctgtacttgcggtccgccggatcactcttgggctttctgcccgtccttgtccctgttgttttctccatgcacatgagatttttggtttgtacttttttctcttccggaatccgcgactttggagcggattcccccggcttttagccgggctagttgtttttgtcggacaaaagactttttgtcggacgaaaacacaacttgctctgttcgcttgaacagagaaccctccttcgtcggattgctgcgcgacgttcacggaacgctgtgatccgacgaagtcagttcttttccatcgtctgattccgattttgcaaaattagacagtgataaccgattggtaaacagcgtttgatatgacatttgatgacatctgatgacatctgatgtcaggtaggggaaatgttggtggaagtttcaaaaatagccgctacttttggcacagtgcatgagggcatacattgaaacattgtcctgtaaggggtattgcttgcctgccacaggtggtgcatggtgtgaatgcggcatcatccatatatgtgcaatgccatatatgctgcacgacaatcctgcatgacggaatacattgcatccgtgcaatgcagtatgggatacattgaaccccatattgcatgaatgcaatgcaccttatatggcaatgcccatcggcaaccggtattacactggtgcaatatggtatgcaatgtattcatgcaaaccggcaaacaatgcgtcattgccgtataccaacggatgcattgccgtgtgatgaaacgaaaaaatccggacagatatgaaacaaattatacactctaaattcaagcctatgaagaaagaacctttatttgtcgctttgagcaaccagaaaggcggtgtgggaaaatccacgttcacggtattgctcgccagttacttccattacctgaaggggtataacgtactggtggtggattgtgattatccacagcacagcatcagtaccatgcggaactgggaagtgggaaacattgagaagaacgtgcatctgcaaaaccagctggtggaacagttcggagcaagcggtaggaaagcctacagcatcctgaactccactccggaagaagcccgggaaacggccggacgctttcttgaaaaatcggagctggattatgatcttgtcctttttgaccttccgggtaccgtaaatgtgcccggtgtattccagtccgtaatcaatatggattatgtattcacccccatcacgcaggaaagaatggcaatgcggagcagcatgtcttttgtccttgccatccgggaatacatgcaccggcataaggatgtacccttgcgtggtatccatatgttttggaaccggatggacaaacgtgtttccaaagacctgtataacggctatactgaaattttccgttcgctgaaattgccggtactggaaaccgtcattcccagtgcagaacgttacaaaaaagactccggaatgaaagggcctctgttccgcagcactttgttccctccatcttcctccgcaatgaaaggaagcagtctggacctgctggcagcggaaatagaaaccatactgaaacttcaataaaaacaattatgactaccaaaagaagaacggattaccaagtggatgaggaggcattgaaacgcatgatggcaggagatgtgaccgctttggaaagaacggttcctccggaagaggagccggaaacaaaaagtcaggctggaccttgttcggagaaacaggagaagaaaagcggttcttccagacagcaaataaaaaaagcaccggatggagcggctgattcagatgaataccggagccggtttctgaaagtgaaactgtcgggagcaagaaggcagacctatattaacgatacattgtacagaactgttgccaaagtattgccggtcattgcaccggaaatgtctgtccccatgtttttaggaagtgtactgtcagaccatctggaaaggtatcagcatatcatcaatgaaatatataatcaagaagcaactcaaaagccaatagaatggaagaaatagtttatttatcaatacggttcggctgtaccgcttatctgttatataaggtatggaaacaaaaagagagaataggtaaaatctgtgatctgctttgtactcctcgcaatcggccacaagcagaaaaagacaacggtgaaccgggaaatgcacaggatgtgatgggagctacccgctttgtctatctggacgagaatgccgggaagaccgtcgccccttacatgagccagcaactggaaaccggaagtgattttatcggagcggataaggatattccggaagatgaagtggaatgcaaactgcctttggaggagatgagaatgctgaaagatgaacaggaggaactggacagccgctctcccgaaacggaagccattgctccgatggttactcctgctgacctgctcaatgtaggcgacgtgctgcttaacctgaatggcgccggctcggacgagaacaaatcatacagggcggccatgacactgcattccatccgggaaacggacatgtttgaactgttctcctcccaggtggagaacaagaagctgattgaggaactgatggggaagtatgtggataaggaagggaatgcgttgcctttgaaaagagagaggaaagaaagcaaacatgttactgactggaggaatctagtctgaaaaggcaatatttatcatgttcggaaaatcctgtatgcgttaaagtatatgggattttttatatgatgtacccatttaacgaaaacatgcaacaggcattcttccaaagtggaggaaacctgttttttctttttcatccgttgtacggcaaagacatctgatgacatttgatgacatctgatgacacctctgaatcatagcgtattatccccatttatctttgttgtcgaattcaaatttatgtcttacccaaacgattcgacaatgaaaagaagaatccttttttctgtgatgtgtgcggtcatcgccgcaaacacctttgcgcagggccagggccttgcgggtatcaacgaggcaaccagcctcatgacctcgtatttcgatcccgccaccaaactatgctatgccatcggtgcggtgcttggtctggtaggcggtatcaagacctatggcaaattttccagcggagatcctgacacttcgaaaaccgccgccagctggttctttgcctgtatctttctgatcgtagccgccaccatcttacgttccttcttcctctaaagcctatggaatatccggtaaacaaaggtgccggcaaccccgtcgagttcaaaggactcaagtcgcaatacctgttcgtctttgccggagggcttgcgatggtgctccttatggtagtctttctttacctgacgggggtggaccaatggatatgcttatccttcggaatcctgtccggcagcctgttggtgtgggtgatattccgtttgaatgcccgttacggtgaacacgggctgatgaagctgctggctgaaaaacgacatccacgctatctgattcaccgcaagagagttttcagattattcacaagaagaaaaaaacaacaatcatgagaaatgtattaaaggcggaaacgctggaacgcagattccccctgctatcggtagaaaacggctgtatcgtgagcaaggatgcagacctgaccgtggctttcgaagtggaactgcccgaactgtacacggtaacggcagacgagtatgaggccatgcactcctcctggatcaaagccatgaaggtattgccggaacatagtgtcgtctgcaaacaggactggttcgtcaaggaaacctaccgtccgaagaccgatgacggagaacagagcttcttgacacgcagctatgagctgcatttcaatgaaagaccttacctgaatcacaaatgctacctgttcctgacgaagacaacccgcgaacgcagccgtcggaagagtgacttcaataccctttgccggggattcctgttgcccaaagagataaccgacaaggatgctgccgcccgctttcttgaggcggtggaacagttcgagcgtattatgaatgattccggacatataaggcttcgccgtctggaaacagacgaaatcaccggtacgaaggaacgtcccggactggtggaaaaatacttttccctctcgctgaaggatgagaccgccgtattgcaggacatctgcctcaagcccggcaggatgcgcatcggtgacaaacgcctctgcctgcataccctttccgatacggaagacctgcccggcagactttccacggacatgcgctacgagaggatgtccacggaccgcagcgactgccgcctctcctttgccgcacccgtaggactgctgctgtcatgcaaccacatatattcgcaatacgtgttcatcgacgacgcacaggaaatcctgcagatgatggagaaaaactcgcgcaatatgctctcgttgtcaaaatacagccggagcaatgccattaaccaggagtggacggagatgtatcttgatgaggcacataccaaaggagtgcttcccgtcagatgccactgcaacgtcatcgcctgggcggaggatgcggaagagttccgccgcatcaggaacgacacgggcagccagctggccatgatggaatgcacgccaaggtataacaccattgacacaccggtcatctattgggcgggaatccccggaaatgcaggcgactttccatctgaagaatccttttataccttcctggaacaggccgtatgcctctttgccggagagaccaattacaggagctcgcccagtccgttcggcatccggctggcagaccgccagaacgggataccggtgcatgtggatatttccgacctgcccatgaagcgaggaatcatcaccaacagaaataagttcattcttgggccttcgggcagcggaaaatcctttttcaccaaccaccttgtccgccaatactacgaacagggagcgcatatcctgctggtggacactggaaacagctaccaggggctgtgcaggatgatccatgaccgtaccaacgggaaggacgggatttacatcacgtatgaagaggacaatccgatatccttcaacccgttctacaccgaatccggaaaattcgatgtggagaagcgtgacagtatcaacacgctgatactgaccttgtggaaacgggaggacgagtcgccgaaacgttcggaggaggtcgctctttccggagcagtgaacgcctatatccgaaagatttcggagaaccggaacatcagaccggacttcaacggtttctatgagtttgtcgccgatgactacagaagaatgattgaagagaaaaaggtgcgtgagaaggattttgacattgacggttttttgaacgttctggaaccgttctaccggggcggagattatgacttcctgctgaactccgacaaggaactggacctgacaggcaaacggttcatcgtattcgaactggacaatatcagcagcaacaaagtgcttcttccagtggtgacactgatcattatggaaactttcatcgccaagatgcgcaggctcaaaggtatccgtaagatgatattgatagaggaatgctggaaagccctgatgtccgccaatatgagtgaatacatcaagtacctttttaagaccgtcagaaaatatttcggcgaggctgtggtggtgacacaggaggtggacgacatcatcagctccccgattgtgaaagaggccatcatcaacaactctgactgcaagatcctgcttgaccagcggaaatacatgaacaagttcgagcacatccagcggctgctcggtctgaccgagaaagagaaagggcagattctttccatcaaccaggcgaaccatcccgggcgcttctaccgggaagtatggatagggcttggaggaacctgctcggcagtatatgccacggaagtgagcgaggaagaatacttcacgttcacgaccgaggagtcggagaaactggaagtacaacggattgccggaggaccggagggcagtctggaaggagccatccgccgtctggcggagaaaaagcgagaggaacagaaacaggtatcaaacccgaaatgaaaacgattatgagaaacagaccccttatgaggctggcggtatgtctgataagcatggccgccatgatattacagagctgttcggaaagcggtatcgaccgcgacaagatctgcggaacgtggaccagcgtggaaggcagacctgacgtgctggtatacaaggaaggagaatgctataaggtgacggtgttttcccgtagcgggagaacccgaaggctgaagccgcagacttacctgctggtggaagaaaacggaaacctgtttgtcaatacgggctaccgtgtcgatgtgtcctacaatgaggcagtcgacgtgctgacattctcaccgggcggagactatgtaaggaaggaggaacgggcatgaaggcaagaacgcttctgatcggaacggcatttgtactgggcgttaccggagcacgcgcccaatgggtggtgacagatcccggcaatctggcccaaagcatcataaacatgtcggacaatatcgcccatacctcaaagacggcagtcaatacggcagaaagctttgccgagacagtaaagatctatgagcaggccaagaaatattacgaccagctgaaatcggtcaacaacctgatacaggatgcccgcaaggtgcgtgacatcatcctgatggtgggcgacgtgtccgacatctatgtaaccaacttcggcaagatgatgaacgatgaaaacttctcaccgcgcgaactggacgccatcgccttcggttacacccgcctgctggaagagagcaacggcgtgttgcaggatctgaaacaggttatcaatgtcagtaccctgtccatgaccgacaaggaccgtatggacgtggtggacaactgctattacgagatgcgccgttaccgcaaccttgtgagctattatacgaacaagaacatagccgtaagctacctcagggccagaaagaagaacgacctggaacgtgtgatgcggctctatgggaatgaaacctccaaatactggtagccatgatgccgttgtcgatagattttgccaacctgcacaccatactggcaaccctgtatgacgagatgcttcccctttgcgaggacatgatggacgtgggcaagggacttgccggactgggtgcgttgttctacgttgccgtccgtgtatggcagtcgatggcacgtgccgaaccgatagatgtttatcccctgctgcgtccctttgccataggcatctgcatcctgctctttcccacgctggtgctcggcacgctgaacaatattctcagtcccatcgtgcagggcacacacaagatgctcgaaggacagacgatggatatggaacagtaccggatccaaaaggaggaactggaaaaggaggccatgctccgcaatcccgaaacagcatatctggtaagtgacgaggagtttgaccgtcagctggatgaactgggctggtcaaccatagataccgcctcccggctgggcatgtatgtggaagtcgggatgtataatctggaaaagaaaatccgggatgcattccgcagcctgctggagctgatattcgcagcggcatcgctgctgatagacaccgtgaggacttttttcctggtcgtactctcgatactgggaccggtagcgttcgccttcagtgtatgggacggattccagtccacgctcggacagtggttcacgagatatatttccgtttacctgtggcttccggtcagcgacctgttcagcaccctgcttgccaagcttcaggtactgatgcttcagaatgacattcaggaactgcagaacaatccggactactcgatagacaactcgaacagtgtctacatcatctttatgctgatcgggattatcggatacttcaccgtgcctacggtagcaggctggatagtgcaggcaggcggtgccggaaacttcagccgtaacctgaaccgtacagccaccaagacaggggggcttgcagccggagcaggcggtgccgtattggggaatatcggaggcaggctgaggggcaaataaaccctgcggagcctccttcccatgagtcgggcaacccaagatgacgggtccggtgacttgtcggaacgggatgtcccgtcataccggaaatatttattcattcaaaccagacatcaaaaaaatggaattcaagtcattgacaaacattgagagcagcttcaagcgcatccgcctgctgctggcggtctttgcctgctgctgtgcgctcgttaccggatatgcgctgtggagctcataccgctttgccgagaagcaacgcgagaaaatctatgtgcttgacgggggcaaatcgctgatgatggccctttcgcaggacctctcacagaacaggcctgccgaggcgcgggaacatgtaaggcgctttcacgaactgtttttctcgctctcaccccagaaggatgccatcgagcacaatatcaaccgtgccctgcaactggcagacaagagtgcctatcactactatgtggattttgccgaaagagggtattacaaccgcctgatttcaggcaacatcaaccaggtggtgcatgtggacagcgtggtgtgcgactttgccgcctacccttacaaggtgcggacatacgcccggcagctgattatccgtgaaagcaacgtgaccgagcgcagcctcgtaacttcctgctcgcttcaaaacacaggacgttcggatgacaatcccaacggattcattatcgagcagtttaccgtgctggagaataaggacataagaagtgcggaacgatgaggggaaaacgcggattcttcggccatgcggacagccgggtacggctgttctgccggcggctgacaggaaagcagcgcatccttctggcaggcacggtctcgttcctgcttgctgcctcctgtctgtactcgattctctcctgtgtatcccgtttcggggagccgggccaaagaccggcaatgggacatatccgttccgtcgtgttccggtcggaaagaacaagaaacattcattcaaacatccataaacatgaaaatggactttcagaaaatcagggaacggctcggagtgtcaaatgacaagccgctgactcccgaagagaagcgccggcgcgcaaagtatattgtctatccgtttctctgcctgctgtgcatggggttcctcctgctggtattcagtccgtcggaaaaggagaaggcggaaatggaaaaaggcaagggtttcaacgtggagatgccttcaccggaagattcggaaatggagggcaacaaggtaagcgcctatgagcaggaagcactggcaaaaaaggaaaaatggcgcaggggaaccttccaggagatgtccgaactgctcaacaagggcggtcaggatactgccggtcttactgcaggaaaagcaaacatggaacttccgccggaaccggaaaaggggaaagcccccggctccatccgttcctctgcagaagcctaccggaatatgaaccgttcgctgggcactgtatatacccggaatgaaaatcagccagatgccgatctgctccgccgtattgaggatctggaaaaagaaaggaagccggcggaagaacaggcggaaggccagaccctggaagaaaagatggctctgctggaaaagtcctacgagctggctgcccgctacaacgggaaagagcctgatgcttcctctacggccaatgccccaaacagccggaaagaacggacggctgtccggcctgtaaaacgggtacagaaccggatggtgtcatcactcgcccagcctgcaggcaatgaagacattgcttccggatatgcaggcgagagaaataccggcttccacaccccggtaggcaaaatgccatcttccggcaggaacaccatcgccgcctgtgtgcatggcacgcagaccgtatctgacggacaggcactgcgtatccgcctgcttgagccgatggcagtggacgatctccttatccccaaaggtacggtactggtcggcggtacacgtgtcgagggggaacggatgggaatcctgatcgagacagtggagtacaggggcacgctgtttccggtggaactcgaagtgtatgacgctgacgggcagcagggaatccttgtaccgaactcgatggagtatgatgccgcacgtgagattgccgccggcatgggcacctctataggaagcagcatcaatatctcaacggatgccggagcgcagattgcctcggatgtgggcaagggggtgatacagggtatgtcacaatatgtgggcaagaagatgcgcacggtgaaaatcaccctgaaggccggacaccggctgttgctgcattctcctgaaaaatgaaggaggaaaggaaatcaaccatttattcaccaatcaaccaagaaacacacatgaagaagattctgatgatgcttgccctgattgcgggcacagtggctgcatacgcgcagcagagcagcggggattattatgaaggactgagccgcaagatcggattcagccggatgattcccccacacggtctggaaatcacatatgacaagaccgtacatattatttttccctctcccgtgagatatgtggacctgggttcgcccaatctgatagcgggcaaggcggacggtgcggaaaatgtgatccgtgtgaaggcaacccggaaacatttccggagtgagacaaacatgagcgtaattaccgaagacggcaacttctatacattcaacgtcaagtatgccgacgagcctttgctgctgaatgtggaaatgtgcgacttcatccatgacggagaggccgtgaaccgtccgaacaatgcgatggaaatctacttgcaggaactcgccggggagtctccccgtctggtacggctgatcatgaaatccgtgtatgaacagaacaaacgcaaggtcaagcacatcggctgcaaacggttcggagtgcaatatctgcttaaaggactttatgcgcacggcgaactgatctatttccataccgaagtgaagaacgccacgaacgtgcctttcgacgtggacttcgtgaccttcaagatcgtggacaagaaaatcatgaaacgtaccgccatgcaggaacaggtcatctatccgcttcgtgccttcaactatgtgacccgtgtggacgggaagaagaacgagcggacggtgtttgccctgcccaagttcaccattcccgacgacaagaagctgatagtggaaatgtatgagaagcaaggcggccggcatcagtcctttgatgtagagaatgaggacctggtacgcgcagaaaccgtcaatgaactgaaagtcagatgaacgccatgaaaagaaactccctctttattaccctcctgcttgccctctttacggggcaggcagaagcccaacgccgcctgccgggaatgaaagccgtccgcttcaccactgaaatggccgacggattttacagccgggcaaaccgtcacgatgcaggctatgccttctcgctggctgtatccacctgtaccgggaacagaaaccagtggatgtttggcggtgagatgctgaaacgtaacatcccttaccggagtacgcatatacccttgtcgcaatatacgggggaaggcggttattaccatacgttcttttccacccccggcaagtccttcttcctgaacctcggcgcttccgccctgttgggctatgagaccgtgaacgaaggagaccggctgctggatgacggagccgttttgcagcaatgcgagtctttcatctatggcggcgcggtaacgctggaagcggaaggatacctgtccgacagggttgtcctgctggtgcgtctgcgtgagcgtttcgtgtggggcagcgcctcgggaatctgccacttccagtatggaatcggagtaaaatacattttctaaccttaaaagaatacatacccatgaaaagaaaaatccttgattttatgctgacagcctgctgtatggcattctcctttcttggtcttgtcgcttgtgacaatgagctggatatcaaacaggaatacccgtttgcggtagaagccatgccggtagcggatgagattaccgatggggagactgtggaaatccggctggaaatcaagccggaagggaactttaccggaaccgtctatacgctaaggtatttccagccggatggtaagggcagtctgaagatggaggacggaacggtactgaagcccaatgaccgttatctgctgaacgaatggaaattccgtctttactatacttcgcaaagcggcaaggaatcccagaccatagacctctatcttgaagataattgggggaatctgcaacaattgacatatgattttaatggaaaggatacggatgaagaaaataacaaggaggctgcatgaaaagaataccggctgttatgatctttctgttacttgtcttgtacggcaaggcggaaaatcccccgtctgacaaagataaggcggtagcctgcatcaagcggtgggaaggctggcaccgggggaaaatgccttacatcggttacggacaccgcctgcttccccacgagacgctgaccgagaacctgagtgaggcacaggcggactcacttttgagatgcgaccttgaacggtgtttgaaggtattccgaaaatatgggaaagattcgctccttttaagtctgttaggctttaatgtaggctgttaccgtctgatcggcaacggcaagatacctaaaagcaaactgattcagaaactggacagcggcaaccgggatatttacaaggaatatgtatcgttccgctgttatcgggggaaagtcattccaagcatagagagaagaagaaaagaggagtttgaactgttctatataccgtagattgcttgttgataaaggtttggttgttacgagacgaccgaatcttttttatttgtccggtatgaacatatccctaacaggtgttgtattttaatgtaaccgaaagacataaaatgtgttattgagcatatggtgcataaaaaatgctctttgaacattgtctttcttgattttttgctaagtttgagatgtaatgtcaaatgcataaaacaagtcgtcatgaattcagaaataatattggaaataaatggctacaaatgcaatctactaaagtataaatactgtttttcccgtaatatagaccgtaaaggaagacctgtaacaggaatgttaggaggaaacatatatatagaaatggaatctaatggcagcaattgtattttggatatgatgcttgttgatacggatcggcagcgttccgctttcttttctcatgcagaaccttttccggtttgggggaagatactgcatagcatagacgatatgatgtttcgtgaacttttacttcgtatcgttatatcattgaaaagtttacggatacaaaaaacgcctaagctatcacctaattgtggcaatttgcgatgaaacctttctgaaagtaagtgtaaccgcaaagaatgcttttcttcgtctttatactcgaattgcttttcaaacataatctgattgttctgttctcctttgacaatgatagtggcttccttaccattgtgggcttgtacttcaattgaaattattgttctgttcatacttacaaattttctttattctatatataaaactttgggaaagatatatgagtgacattttgtcagaatagagatataggcatacctcttgtacatataaaagtgtcccctaatattcgtagtatcaggaggaaaaggattcgtttaacactgtaaaattgaacaaaatatggtataaatattggattgaatttaccccatagggaataagacaaaagcttatttggttagagaagtgattggtaataaacttgctcttaccgcacccgattatactcgtttatacttgggtatgtctgaagttgaaaagataacggactgtaatgtgttatttaaactgggaaaaatagatttttaaatattggaatatgaaagaagaaagatttattgaagaagattttgaaggttttctggaggacttgataaagtctggtcgtttagatgacaaagaagctggtatagctaaaaggatgttggacaaaggatatgacaatttatctgataaacaaaagtatgtctttaataagatgattaggaataacagcgttgaggaatgtcaaagatgtgcttgtgatattccttggtctgaaatgcttgaagctcttgataatggcggttattgtaactactgtcagcatatgatggagaaactggaaaacgagtaagaaaataacgggaatagctatcaaggttattcccgttaatgtttaatcagttattataaatcagacaagcctatttagggtattgtcgtaaatactcacctcatataaataataaataaggacatttttcccaaccatattatgattatatgaacgaaaaccataaagacacattacatattgaaagtattcagcaactaaaaaaacaagaatcctgatttagttgatgcttttctggaaggagatagtcttttatttagagtgcactataatcaaaatttaattccatatacttaccctgttcaagttaaataacgagcaaatagctgcttggataaaatgacttgaatagtcaaattagatacatttacaaagcgggcagagtcataaaatgggaaagggctaaaaacagaaacgccacaggtatgatgtgatatacatcaccttgtgacgtttctgtttttttaagatgtatttgtctgctattcttacttttgaagcaagtattcccctattgaaagataccggtctttgattgtggcattttcattgaatccattcagacaatggagcaaggctttctccaaagtggtgtatctgcggttaaaacattgcggattgtccaggcaataggcattcaaggcatatctgtatggggcatattcaggattatcctcttttgtgattttcacatgccaaggaaagtgtatccgcagagtgaatgaccgtgtttccccttttgtaatccgttcctcttcctccagcatttttttcacgagggacctgtccagcaacggatatccatattccctgtaatgtttgatatggcagcaatactccgttgcgtattgcttcaattcttccggtcttataccatagtgcttcccatagaaaagcagcacttccctgcctgttacgataacgggctttccgtccgcttcatgtttaaatacctgccgttccatcttttccctgtctgtcagcaaggcaaaaccgaaacattccgtaagggtgaaactttccctgccgggaacggacagcccaataaggctttccaatgtgtggcagtaaaagaaaataccgtcatcggccataccggtgtccggtgaaagcataattcttacatccttgacctgaccgctgtccctttggacaatccggcaatttgcgtaatgtggctcacaagcattctctttcttgaacctgtggtatttctccaaaatttcgttccggatttcctccttgtcggtcagggcaactcccaatccgcagttttcgcaccacccgtaataaaaagcttcgtccgtgaagtggtcgaactcttttgtgttggggtttaccattgcctcacacctgacattggccgatccgcatctgctgcacactatattattttccattgttcttctgctttacgggcgactcacggccgcccttgtcatacaattcggttgttattctcttaatttatctttacccggttcatcagctgtcccgaaatttcatgcagttcccggcagcgttctggctgctgttcccttgcaaaggcggtgattccctgtgtcagtttccatagcgtggccccgcctgtaactccgtcgtcaggattgttgttcatcagcagtttctcgacctcacgtccctcgtttttcaacaaggctcctttctgcaccagattcttcagttccttgtcgaaatccacgtctatctccgatgctccttgaatttcgatggccttctgcatgatggtgtctttgctgtacagtcctttggtcaggtcggaaacagccgatacggtggtctgcgtgtccagttcgtaggtcttttgggagagggacagggattccggcagtcggcctccaaggtgtatctgccgcatgacggactccctgaccatcccgttcaggcacgccccgttgagcaggaacgaccgcatatcgaccgatccgttgccatagtcggatgtggagaagcgtgctcctgcgaagatgatgaccgttccgttcttacgggtgggtatctctatcggagtgggcaggattgtttcacaccatactttcgtgtcgttcatataggcatcggacacgaccgctccctgtcctcccgcctcacggatgaaagcggtcagtatatccaccgagttcagccgacggtaggagtccgacaatacgccccggacttccattcctaccgcccgtatcagtacccgtgtacgctcggtccatcccgaatgctcgttcaggatggtggcgcacaactgtttctgccaaacatccccggcggaaagctcgcgcaggtatttggcgggaatgcccatcttctccgaaatctggcttatggcgttgccgtgcaggttgaagttcccttcgggcattgccatctgtacccttccttccgctttgaaagagataacggggcgttccttgctacgttggcttaccccgatgggagcgatgaaatcctgcgcgatccgtccctcactgagcagacggttaatggtgtccatgacaccaccttgcctgccttctatcatccgctgtaccttgttaatgactacctggttgaggccctgctgcttctgtaccgatgcagctgccggcattactgttgtttccataatactatgtttttaatgttgatgaatcagaatttattcttagagcttgtcttggttgttttagcatgtcccatgtatttttcttctgacaaacggatataatcctcttcgctatatccggtcagcccgaacagttcataatatccggggaaagtttttttccccgcttccggtatatgcatgctggttcccttgtggcagcagatgatatgccggacaaagcggtaacacttgcaaagatcagccacgacggtatattcgttgtccgtatgaggttcgtaatatccacaggaaagattgatacaggatacttccagaccgttccttttcaaagccgccacatctgtattcagtccctgtgccggcttgtagccgtacttccggacatctatagctgaaatgaactcgttggagcagagcttcatcccattgatttgtgttaccatatccccgttccctttccggtcacactgaatcacgaaacggcaatcggaaaagaaggacatatcggcatggctgctgcctatgcatcccacctcctcctgtacgaagaaggcacatttcaccgtcttgcaatcctccaggcatttcaggcagatccagatgccgttcttgtcatccgcaccgattccggtcatccgtttacgcttgtgatcatagccgacaatcatcgagtccgccacaagatgggctgcataagagcctgtcttgcgccggtgtacctcatccatgtgcgccacgacacaggggtagctttcccggttgcctttgaccgcatagatgtttccgtacctgtcttgccggaaaggaatctccatccttttgagttcctctatgatgaatttagccatcttcccctctctgccagagggggaagaaatgccgtaaagagccattagtttttccatgataatgatattttaggaaatgaacaatttttcgatttgcaggtatcgtctgaattccggtacgggacgccctttacgaaagagaaaagacggatatttctttcctttatattccactgataatcctttcaggactttcccgaatacggtagatacatagtacatatcctgacagttcttgcagaatgccgcatccgggaagatatgtatcttcccgcatttgggacatacatattttttcctgtttgcacacccttccgtgctccggcaggtggctatgctcgtgtcgccctccgtatttctcagttccaggttaccgtccgtcagatgaaggctgtagaacgtgtcgaggtaaggcacccctttcttgtgccacctgcaggcgggcactttcaccgtcaaagagacctgtatattatctccggccgcccattcctgcccctcaatgggattcagtacggtgaaatccgtcgtatgtgtataatcgttgtatctgcgtcgcaacaggatgcctgcctcctgcgcctgcttgcggatcagttcgacgacgaatgcgtgtgaggaatagatacgatccagcagggaggcggcaatcggtgtgtttattgatttccacaatgttatctcgttccatacaatggcccgtccgaccacattgctgctgtcatcccttgccacgagtattttggctcctgcgaaattggcatagaaatccgctgcattacgggccttgtcttcatatctcatacaggagttgtgcaggctggattcgctaccgtcagatatgggactatagttgctttccagataagcctccataaaatcgttcatactgtcatgcagtctgattgtgaccttgctgtccagtgagatggcgctgcagaaatagttgatttcatcgggctggtacggtcccagatttttgaacagctcgataaacgtggacggttccagatctgtccggttctccggaaaccagggtgcctgcggattgttccggtccgggaaattgggatggcccaagtctttgttgcatgccgtgaacacgatccggattttcttgaacgtgccggcttccgtccgtttgcgtttggtggagaaaaaattgtaggacccccgtatgacttcttccaccggtacattcttttttacttccgaaaggatatctttggctatcacacttccgttttccgccgcatgggtcaggcgggatttcaattcgttgctaacattcagtttcataatcattcggtttattgtttataaattctgttgtttatatggcaattgtttcttgccaggctgcatttggcgcaatttctctttccgctttctgagcaggtcaacggacatgttcctgcttgtccgatattcctcctcactcatccggcgaatggagggaatgcccgtccgggtcagcgtatggtttaccatccagccgtccatgaagttttcggggcagaggctgtcatggtggatgacctcacctatgcagccatgtacgagcatgttgcaaacggtcatcaggcaacaggtacggctgacatcctctgcaaccagataattacccaggtggcgtacatgatatgccagcagcagccttccgcttccgcatgtcgggtcacagatacgttttcctgtcgctgtctcccccgaatcggtacataagaccatcaggtcgcagatatccggcggagtgaagaactgtccgttcacctgccgaccgcttttggaggatattgccatgaagaggtcaccgaacgcatcaaaccatccgccggattgcaattcccgctgcatgagccgtatccatccggtaagcatttccataaaatgcctgttctgctgccgtttgtatttccagtccataaggggcggtgcgccgggagagaacccgtgaatgacatagcgcaggaaatcgttgaaaacggatatcggatcgtagccgttcgaataggcgaaatcacagaccattttctcaagcggacgtatcgcctgcggtgtgttgtatggtaccatattactctgattttttatagattgttactatatgtcttttatggtcagtctgtatcctgacgggagaaatgccaaggaaagagagatgggtgtccgctttcagcatgttccattcccatgcgggaagttccttccattccatacggtatgcccagagtatgaacagaccgggacggaatccgttgaaaagctttccgtgcagaatcccgaccagccgttccagttcttcccgcgagtaaagggtgaatgcctcattccgatagacaaaggcatcagccggttcaatatccggctgacactcgatgaggtatctcttccattcttttgtggtgtactttccgtacagaggatcgggttccgtgtatttccatgccctgacgaatgtgtggaagaggacggcaccgttcctgtgccttccggtatgcccccacatccggaactgtttgctgcgtatgccatcgggaatcagcaattccggaccggttgtaacccaagggcctccttcggtattgtaaccggtacacttttcattttcatggcaaaaaggtgtctgtgggagaaggcagatatgaacttcccggtcatcgcccctttcaatgtgtgcctgcggataatagtcaccgccacgggtgatataagtgacaacgtctcctgcagtcggtaaaccggctctttccctgtcctcccgcatccttgaaatcagccggttcaccttctccacatcacattcctttatggagcaggcacacccttcatgcctgttgagcagagtcagactttccaggtcataaaaattaccgtacttcatattgagatcgtttttgttgatacaatttgacctgacgggcaaccatgtcgcagaacttctgtccgttctccttctcgcttctgaaataggcaatcatgtcccagagattccgattgaagtagccggtccatttttcgtaatagtgacctccatagacctttccgaacgtttcctcgaaaagtgcaggagtcagcccttcatccccgtggtggttgtattgccacagggagacaagcagcagctggttataatccagtgtttccatatctgttcttttttaagtaaaacatcggcctacatgggtaggcatttttatttcttgatgtctttcctgtctgttttccggggattgcggcaaggcttggcgaaagaaaataccgcagcgaagcgaggatgattttctttcagccaacccagcccctgaaaggggccgccttgcacaatcagcccggaaaacggctatctttacagcaagaaatgaaaaagcagacctcggattctctgttctgaagtctgcttttcggtcattgtcaagtttcatgtttttcaggtatgtatctgccatccgtggaacggctgcaatgttacggcaaacgacctgtcaggtattccatgatagagcagacctcccacgatacctgtccttccgtcgggatagtgctgtgtgaagccgaacgagtacggggcatggtcatagtagagtgagatttcgcagggataatcaggattcccttcccaactcttcaaccgttccaagcacttttgaagtgaggtgtcaccgatggattcggcatagcgctttacgttctcgaaatgttcttcattcaggattttcataacttttgtatttttatcagttaaacacgtccggctccgggagccggtatttttatttctcgcctgcctgacagtcccgtggccgtacccgcaaggtttggcgaaagaaaataccgcagcgaagcgaggatgattttctttcagccaaccccgcaggggcctgaccttgtacgggtacacaggacacgggactacctttgcagggtgggaaataaaatatacggttgttttttgttgtgggattttgtgtggattccttagataatcttcctgatttgttcgccattgccggacaaatgctgtatttttgcaatttctaatttcaggattatggaaaactatgtaaagaaagcggcggatgctttccttgtggagcgtccgtacggtatgcgtgtggattacaggaagaaaggattcgtgctgtttaaccgtaacctcaatgtgttgggaaatgcggaacagacccgtctggaagaactacctctggagcggttcaatgtggaggagattccgttggagggtgaagtcgtggaggaacacgcgggatttaccgatgtattcttctataccgatctgaccaatccctatgccggatatgtactgaatttgcaaaagcttaaagcctataaccggttgatgtttccgctggcaatggcgctgaaccgtgaattgtgaggccggaagccggtagcggtaacagctgcatggagcagaccgttaccgccccggatttaattatttgccctctttttctgttatgaacgccagatagacggacacggccttatggcatccggtaaagtccggagtccggcagcccttgattttccggaaactgacggttccgttcctgtcaatgcccctcacatgcctgttgaatgtccctttggttctgatatggatgtcaaaaccgtcccttccggtgatttcaaggaacatttctcccgtgatccgttccccgtccaggaatttctgtttctgttcattgagcagccgctgatgttgctcttcctgcactttgcgctcttccgcctctttctccttctgctccctgcgtttctgctcctgtattcttttatattcctcacgggcttgcaccaagggggtggtgtcaagtccgagagcttcgaacacgcggacggagatcaaattgacgaaggctcctctttccgcactttgaagcgtatccgcaatccagttcctgcaataggtggcggcttcctctctgcaaccttctcccttgaggaaccggcgtgaatactgcccgctagagaaataaacgttttcaatccggcagaccacatggaaacagtcatcgtcttcattcccgtattcgttctttctcgacagggagagatatacattctccgcgtacggctccagttccatataaggagccacgacggtattcccatcagacttgtacttgaatacttttgctttcatactatcgttcagtttgtcggttgttgcatatttcatctataatctctttcccgcttctttcacccttcaggaaggcaaggaagcgcctcaaaaagagccgggcacagtcagttcccagctggaagctttcaccgtctttggtagcacatacagcaaaacgccccagtccgaaactgtcctgttgtggtacgatgtggtaagacaagtcctcgcttgcgttgatgtgcaacccacgacggaaaacatagaaagttttcgggattcttctgtcggtatcgatttccatacgcttgtaaccgtgatgttccaataatcggcccagttccctgtttgtcggaattgtatgtccgatccagtccggccagcttatattttctattgtgtgtccgtaattgtcatataatatgttgaactgttcctggtattcatcgtaaaattccccgttcccgttgcacatttcctccaacgcgatgccgtttttacggacaagggcaaggtcgcccagtccgcacgcgatttcattgagcagcgtgcgttcctcatccctgttctttgccgttccgtaaattctaagccgggaatatcggtgtagcgccgaacgggacggcatatccagtttttcccatattccatcgtttcctatagcctgtctggtgtttcccggaagtccgtaccaccacttgtccaaattgtttgtatccataatttctgaatcagattgttttcaaattctgttttgagtaccatgcctgatacgcggcggcatactcctgacgttcccgttccagggaatttctcatttcaggggtgtacccgagcaggcggatgtatcctccgttatagccggtgggttcgcactttattccggcttcctccagtttgtcgatgcgtttttgggccatttttgcgcttgaatattccttcggccaaaaatagacttcgccccgtgagccgaaacagtcttcccccagaattatttccccggcatacttccggctttcgatgatgccgaaacgcgctttgcccaatgcctggcgcattgccttgtgtgccggaccttccggatgcttgaatacctccggcttgtctttgctgccgagtttgggcggttccaccttgtacggctgtttgtaacttccgattccgagcgtcaggtaaaagttggtatgaaaatagtccgtcatgggggcgctgtcatcgaaattgtacgacatgacgaaatcgcagatattcatcattacatcctttgccctgtccgtcaatgatttgtctgaatggatatgatggtggttgacatcgccttgaacttttccggactctttggtgaacgcctcgaaatccgctttcatcaaccggatatggatggagtggtaattctcccgtctggcagagaacttgtatcccggataggtctccttgagccatgcccgtaccagtcccacgatttccggagcgtgctgccccttgtaattgcggcctttccagcggtattcgttatacacatacccggtgtattcctttgccgtggctcccggatagtcatattcatatccggttgaggtcgagggaatatccggtttttctttccaagcctcaaaaagccttccaaactcggtggtcacctgttgcatgattgcggtgtcaccacccttgtccgggtggtgctccaatgccagccggcggtattctttcttcaagtccgccagagagtgtatgttctgaaaataagtcatagccataagttttttatgcccctgcgaggcggttgataaaatattcccggtagtcaagctcaaaaccgaggttgagacaggccgtttccatgtcatcttctctcaggtcgtccgcctcctgcaattcgcgcaggtaccgtatttcggagtccaggtattcctgtgcttccgtttgaccgcaaccgcatgagttgcagatcagactgataatgtttccctgcatgctgtttgattttttatgtttctgttcctgtttctgaggcctcgtccgtcatatatcgagacggcccgttccaccagaatcctgcggttgtcttccgagagttccaggtagaaccgttccgccgcgccgaatgtgcccttgtctgtcgccacgcaccatttttcccagaaatgcgggtacatgccgccatacacggctttgcattcctcctcgctccaggcgttccacatgtagtagaagaaactggagacggtattttccgcttgatatttcatggttcttctatttgtgattctacattgtttgtttctctcagttgatgccacacagcctcatacatctcatgaagccagtctatgttctttgcgccgagttcaaacgggctgtgacactgcacctcgtcaccgctttctttctcttcggcaaggacggtcaggctgtccgccgttacccggagtcctgtcaccctgcattcatatggttctccgttcttgccaaaccatatcacccagaccggatcataatcctcttccggaagacgaatttctttcatgcagtgagcatggagcaactgccgtatcgcgtcgatgatgtccccccgcagttccttgatcctgccgctgaaatcaacggcttctgacggtaaacttccttttccgcctctttcctgcaaggagagaatccgcgtgtcgggatggatacagaaatcccactccaacacttcatcgtcatcgcgtgtcgtgtggatatcgccgcccaaaacaagaccgcaatcgtcatttaccattctttttgcttcatcgcggtcttctgccgctaccgtgtaagtgccctcgaaggaataccttactcttatgtcatatcttttcatgattctttccatttgattgttgataccagattcattgcccggaaggattaccggatattcaatattgcgctaaagacatgtgggtcaagcctgtaaaacgtcggaaggttaagtgtgaccatcgggtagcttacccagccgctctgacgtttatagcctgtatcctcagccaatttgttggacagaaggaactccatggcatcaggattgttgttgatgtccacgaatgccctgtcaggcagtgagaatgccgccttatcttccaggttaaccgtcaggaccgtgtatatctcatgggtcacgggatctttcagagacaatgccggccagccgttatggtatatttcaatcacgattgagagacggctttcctgatacaggaaagtctcttccatggacggatggtcgcatttgataatttcaaaatcatcctcccctttggtaaatgtcaccatcggataggatacatcgacaaaacattcctcttcccggtaacagagatgttcttttccctctgaacggattatagccaatcgggtgttcatattcgtaactggttttaaaattattgacttgcaagttaattggtcggaattcacctgcttgtttctttaaacgtgtgattgtcaccgcctgcggacatttgggagagttgctgtctcaccgccttgattttcccgatcagttcgtcctcccttcggaatgagggggtacatttggtacgcctcatcccggctccccaggggatgccgccgcatacttttctcaggcgtgccttttcgctttccaaggccgactccagacgggccaacctgcgtcgcaacgattcttcggtcacagttctcatgatctcattgtttttttagtatggtgacggatcggaaagacagtcaccataccgtcgttatgtgtcacgttatattttagctttttcccttttgatgcctctcaggacgtacaacaggtgtaggaacagctccctgtcgtaaatccggaagaagaacggctcgcctgtttccctgaccgttccggtaaacgacacggactcccggttcacgggatattggaagaagttgccgtttgccagcagggtgtgctttttcttcatcacttcgcctaggaacctgtccatatcgtcgtttccctcatagccggagaagtagaggaaatgatgacggcgcaggcttcgcaggattttggcggtttccagcctcacatccctgcctgacgattcgtccgttcctctcatcaggttgcagatgaactttttctcgccatttatgtcaagaaacagataaggaactataattatagaggcatgccgtgcgtggccggagatgaccatcggcttttctttctggatgtctcctttgaaggtaatgttccggtaatggttgtccatctgccgttccagctccttccttggcgtggtaacggagcggagtcccgtgaagtagcgtccgcccgcccggaaacagaaccggtagatgtccgcatgataaggctctcccaggaaaaagaaattccgggtatggcggatggggggcaagacatccatgtagtcgaaatatctttcttccgtaatctcactgaacggggcgcagagggattgcaggtggatgcgtatcattttgcggacggtatttccggacacggctgtgagacacgggttcttttccctgtctctcagttcctccagtgtctcatggtggtagtcgccgtgtattccgtcagacatggtggtcacgcagctgccgtcaaaactgcgtgaatcgactacgaatttcagtttgtcgttattcatggttcagatgttttgaaggttcaacactcttttggcggcactgagggcattggaggtgagctgccgttgccatgccttgtttttgggtgaccagcggaatccggaggatttcagttcctttcgtctgctgtcttcaggaatcctgtcaaacaggatctgaaggcggtcttccccatagttccatacaagtgtcccgccctcgaacggcacttccttgttttcccggctttgcatcgctttcagcttttcgcgcatccgttccgccagttccggcaattggaagaatttgtttctcggtgtgatgacgggtttcttcacccttgcgttatattcggaaatgaagtccacggccctacggacgatttccacttccccgtgattggccaaagtggataccttgttcaggatgctgctgacaaacagggcacggctatagccccggcattgtccggtatcaatcccgtggatggtatcggcactgctcttgatgtcgcgtttgagcgtctgccatgccttttcctgtttctcttcctccggtcgtgcggcttcctttttccgtctgacggtttcaagaacttttttccgccaattgcggaattcttcgtaacggttctgatagcttctgttcgttttttcctgcctgtagtaatcaaatccgctccgtcccgtcaccatcgggttggcacagcgggagaggaccgagagctgggcggacaacttctgccggtaggcggcgatgtatgtatcccgttcctcttccggcatgagttgcaggtcgttgtgcagcccctctccgtaaatcatgatgtccgtctcgccgcgaatctccggattgaaggaactccaggcgtatgcgtcgcaagcctgtttccacatatcatccaaataggcaggatgtttgaatgctacggcttcccagtctttgaagtccttggaatgcaattcattgtgatcttccggatttccgtacaggtgtacatagttgcccgttccatgatgctcctttctgaaatggaacggtacggggggatagtccgtaccttttttccggatcatcgtgaccctgtgtgcattctctatggtaaggtctgctacttgctcttcgcagacctttgctgttgtttcattcataatcattacttttttaaatgtcagccgtaaatcatttcttccagttcatcgtccgtcaacaggcggatctcttcgtccgaacaatagtaagcgatttcttcgtccaaatcgaatgctgtcggatcaaggcttctgatgccatccagcagttcctgttccagtctttctacggaaaccagatagttcccatctttgccttgcacttcccgtgcaggatagctcatttcccgataaaccaacatcgtcatttccggattggcttcctgctgtcctttgcttgtcgtctttctgttcatacctttatttttttaagtttgacatgatcggctccatggagccggattttcgttttcttacttgcctggctgtcttttgtcggggattgagcaaggcttggcaaaagaaaataccgcagcgaagcgaggatgattttcttttagccaaccagcccctgaaaggggccgccttgcgcaatcaacccgacaaatggctatatttgcaggtaagaaattgaaaggacggcaggatattgtgaattatagattacaaaaaaagccatccctagggggacggcttaatgactgaatttgtatacttattgtgcaagacgctccttcacgttgttcattgcttctttcaggctgctgttcatgacccgtgcataatgctgtgtcatacgtgtggaggcatggccgagcatgacggaaacatcttgaagaggcacattgttggcaagcgtgaccgtagtcccgaaagtgtgacgggcaacgtgcgtggtcagattcttcttaatgccgcagaaatcggctatttccttgagatagctgttcatcttctggttgcacatgacgggcaaacagcatcctttcttaatgcaggtcggatgttccttgtatttctccaatatggccaggggtacgggcagcaatggaatattgctgatggaagaagccttcctacggtgttccaatttgacccttccttttcttatccaccagtctccgagattgtcctgtaccagattctctttgttcagactggcaacatcggagaatgccagaccggtgaaacacgcgaagacaaagacatccctgaccagttcaagccgtggaatggtgaatttctttttcattacggtctgcaactcgtcataggtcaggaataccggatcggtctcgtcctgctccatcttgtaaccgtaaaagggattcttgcgcatccattcctttgccaatgccatattggtaaatttcttgaagcatttcatataacggactatcgtgttccggcacagtcccgcctccgttttcaggtagatgtcaaacgcacggatgaactccggtgtcagctcatggaaagtgacatcctcctttccgtaataagaggggatgagcagctgtaatttcttcaccacgttcttataccggttgatcgtgacgggagagtagtctatacccgccagtatttccatttccttgatgccttccctcatggtgccgagcagtgtacgcatttcggtgtctttcccgaaaacacgtttaagaatcagttttggggtaatcagggcctgttccaataccagttccttgtgtttttccaaggcgcgtgcgtgcagttcggcaatataggcgttcagtgccactgatgccctgtccctgcctttactgcatcctttggcggcgttccataagttcaggggtacgcttctttggatacgtacatcgtcatagtctccattgatggttatccgcatcaataccggtgcctcaccgtttttcaacaatttcgttttaagcacgaaaaacagaatgttcattgttccttgtttcatcacttttgttttttgaggtgttacattcaattgtttcgtcaaaaccggatggcatgaggacgtggagcgaaatgttaaattcggtggtttttttgagggacttgtggaaaagccataaaaatcccatttttctcaggttcgaattgccttttgtatcccgggttcgattccttttttttatcccgatgggaaataccgaatttttaaatttctttcactttttcgacttcatccggtcatgtgtgcaaaattactttttcacaccggagattggaattgtcaaacagctgaaaaacaatgaagtatggtgcgtatttatggctttttcaaaagccttaaaaaaagccactgaattggcgaaatccaacttcacaaatatgtagcggaatgcgtagtgagggtaaaaaaagaacccttgaactatctctaattcaagggttttcatgtgtgaaaagcatttatgtactttctttggtggtgccaccaggaatcgaaccggggacacaaggattttcagtcctttgctctaccaactgagctatggcaccatcatgttgttttgtatatcgttgtttcgattacgggtgcaaaggtaggtattatttttaatccagcaaatgttttgaaagaaaaattcacaggacagtaaattatctatttttcctgcaaaaaaatccacttttctcttgcaggttcaaaaacaatgtgtacctttgcacccgtaatcgagacaacgatacaaaaaaaacaaaaaacgggatgtagcacagttggctagcgcgccacgttcgggacgtggaggtcggaagttcgagtcttctcatcccgactcatcaaaaaggcaagaatcttgaaagagatcttgcctttcttttttcaatcctattaatatctaatgaataacaaaaggtatcaacatatattgttcgatctggacggtacattaaccgatcctatgattggtattaccagttctgtaaagtacgccctctcctatttcaatatagaagtagaagatttacgatctttatgccctttcatcgggccaccattaaaaacatcctttaaggacttctatcagtttacagatgagcaagcagatgtagccattgctaaataccgggaatatttttcaaaacaaggtattttcgagaataccctgtatcaaggtattgatgaattactccgtttgcttaccgaaaacgaaatgaaaatctacttagccacctcaaagccgcaacccttcgctcaacaaattctagaatatttccacttagaatcttattttacatttgttggaggaagcacattcgacggaagccgttccgaaaaagcgaatgtaatacaatatgtattagacagcaccgatataaaaacacggtctgacgtagtcatgataggtgatcgtaaatatgatataaaaggggccaaagcgaataacatagattcaataggagtcctttacggctacggggatgaagaagaactagcgaatgccggagcaaacaaaatcgttactgatataaaagaactatcatctttccttctaacagggaatatccccatatagaaagcttaagcagatctataaatcacattaaaaataaacatcagcaataaagagaatgaaatatttggaaaactcggcttcaaccgggctaccaatttttctatagcgatcttcatctgtacacgaaccgtactctcttgaaccgataatatttccgcaatctccttcgttttcaatccctcctcacgagacatcaaaaacacaagacggcatttctcaggaagttcgtcaatcgctttatcaagcatctctctcatctcttttaactccaaatgctcctccggagaaccctcatcttcctcttccattaatggcaacaactcatttaaagaaaccctattcaagtctttattccttgcttgaaaacgaaaagactcgttacgtacggaaatatataaataggtatctatattatcaatatcctttaatcgtttccgggattgccagaccgagaaaaaaacatctgtcacaacttcacggcatgcctccttctcgcctaaacaataataagcgaagcgaaaaacctgatcataatataaattataaaaacgttcgaaagctcccctgttatctaccgacacagattcaagcaaccctttgatatctcgcacaaaaactcccactcctttttctttgatttggcaaacatactaaatataatctaaatgcctttttaaaaagcggactattttttctcatattttacttgcatattcaaattattaaactacttttgcacccgcaatacggaagtagctcagtcggtagagcactggtctccaaaaccaggtgtcgggagttcgagcctctccttccgtgcgtgagcggcaacactatgaatatgtgttgccgcttttttattattctccttctcttcccattgcgataaaaaagcgtaaataagacaacatttttcgttaaagagactattttttctttcaatatataaaggaatatactacttttattgccgattttaaatctaattgagacttagtgtaaatcgtataccatagaaacagatgacaactaacaaattttcaaatcgatactcgtctgagaggaaaaagtattttttcaaaagtaaggcgtttatcctgttcctcggattatttttgggagctgggattatgatcgccctttataaaacatctgtatatttctcgacagatgaatcttgtatgatgtgccacgtgcatcctcacgtagaaaacagttggaaactttccaaacatgtaaataatggaagtggcgttaagacacattgcgtagcttgtcacctcccaccccaaacaaatacttggaaacattatagcgcaaaggctaaattgggtatgaaagatgtttggtcatacttgactaaagacagcgcagatttcaattgggaaactaagtccgagttggaacacgccgttaaatatatccccaatgaatcttgtaaggagtgccatcagaacttattccccgaaggaattaccgatgatggtgtaacggcacatttatattatgatgagaatgagaaaaagctagatctacaatgtattagttgccatttggatgcaggacattacaatccgaactacaatcactctaagatggttggcataccgggacaaaacacatccggggcaacctcgatagataccagcctgttttttaaggaaccaactacagtaacctctttcaccgattatgtagaacaaattcccggaacaatggtctcattcaagatgattgccattcccggaggttcattcaaaatgggtagtgaggaaaaagaggcgtttcataaagcagatgagtcacctgtacacaacgtaaccgttagtccattcttcatggctgaggtcgaggtgacttgggatcaatactgggctttctatgggaatacgatgagtgagggccgtacccctccagagaccgtatacgcaaataacagtaatccgaatgtcgatgccatctccggtcctacacctccgttcggtttccctgatcaaggctggggtggcggagatcgcccggctattacaatgactcattatgcggccgagactttctgccaatggttatccaagaaaacaggaaagacttatcgtttaccgaccgaggcggaatgggaatatgcggcacgtggcggcacggaaacgccttatttctttacgggtaatccaaaagacttctccgatcaaggcttctggcgtaaatttttcgacgctaagactgatagtataggttcttatgtgatttatagcaagaacagcaaaaacaagacgcaagaaccggatttagtaaaagccaatccctttggtttaaagaatatgttgggtaatgtaatggaatattgtgccgacaagtatgatcctgaagcttacgctaaaagcggaagtagcgccacagatccattggttactgaaggtacagaatgggtagtgagaggcggtaattacacctccgatgcggcagatcttcgctgcgcttcccgtgattataccaaacatgaagcttggttaaaaaccgatccgcaacagccgaagagtatctggtggtactccgacatcagaggaatcggtttccgtgttgtatgtgaacctaataaatagtatctaaaaaaataatatcatgaaaaaagagaacagcattagcagaagatcatttctgaaaagttcagccctagcgggtgcgcttggagcaattggaacaggtagtacagttggtgtattaacttcttgtggtggaggtgaaagtgcgaacgcaataaagcctttgaaagaacccggtacttattacgtgcccgaattaccagatctggcaactgatggaaaagaactaaaagctggtgtaatcggttgtggcggacgtggttccggagccgcttttaacttcttgaacgctgcgaacggcgttacgatcgtggctttaggcgatacgttccaagaacgtgtcgatgatttggcaaagaaattaaaagatgagaaaggaattgatgtaccggctgataaacgtttcgtcggcttggatgcgtacaaacaagtgattgatagcggcgtagatgtagtgatcgtcgccactcctcccgtattccgtccagttcatttccaatacgccacagaaaagggcaaacattccttcttagagaaacctatctgtgttgatccggttggttaccgtaccattatggctaccgcaaaacaagctgcggcaaagaacttatgtgtcgtaaccggtactcaacgccatcaccaacgcagttatgtcgagtcttacaagaagatcatggaaggattgatcggtgagatcacgggcggtacggtttactggaatcagaatatgctttggtatcgggatcgtcaaccggaatggaacgattgcgaatatatgatcaaggactgggtaaactggaaatggctttccggcgaccatatcgtagagcaacacgtacataatatagatgtattcacttggttcagcggattgaaaccagtcaaggctgtaggtttcggttctcgccaccgtcgtatcactggcgaccaatatgataacttcagcgttgatttcacaatggaaaatggtatccatatgcatagtatgtgccgccagatagatggttgtgcaaataatgtaagcgaattcatccaaggaaccaagggatcatggagcagtgacacgatggagatcaaggatttggcaggaaacgttatctggaaatatgatagcgaggccgaaaaagcgaacttcaagcaaactgacccgtatacattagagcatgtaaactggatcaactgcatccgtggtggtaaacaaatcgagcaagcttctgagactgctatctccaatatggccgcaatcatgggtcgtgagtccgcttacacgggtgccgagaccacttgggatgccatgactgcctctgcattggattatactccgaaagatttgaacttaggaaagatggatatgagcggcttcgtcgttcctgttccgggtaaaccaatcgacaagaaataatccagactgtttatgacattaaatagaagaaactttttaagaacctctttatccggcgctgctttagcggtaggaagtacggccttggcctcctgctcttccaagccggcaaagactgccgaaggagaaaaagggagcgacaagaccggcaaggaccttgaattaaaactttctttccaagagggaatcgccccgggtgaaagtttgaacgagaaacttgattttatggagaagttgggcgttgtaggttttgagccgggtggcggaggattagccggccgggtaaacgagatcaagcaggccttaaacggacgtaatatcaaagtgagtgccatttgcgccggcttcaaaggctttattctttctaccgatccagccatccgcaaggaatgcatggacacgatgaaagagatcatcgccgcagccggtgaattaggttctacgggcgtgattatcgttccggcctttaatggtcaagtccccgccttgcctcatacgatggagacacgggatttcctttgcgagcaattcaacgagatgggaactttcgccgcccagcatgggactagcgtcatctttgaacctttgaaccgaaaagagtgtttttatctacgtcaagtagccgacgccgcctctttatgccgggatatcaataatccgggtgtacgttgcatgggcgacttctggcatatgacatgggaagagacctctgatatgggagcctttatctccggtggagagtatctccaacacgtacacgtggccagccgcaaacgtcgcagcatgccgggtgaggatggagatgccgataactatatcaatggcttcaagggattgaaaatgattggttataacaactacgtaagcttcgagtgcggatgtcagggagaccgtaacgtggtagtccccgccgccgtcaagttattacgtgaacaatgggaacaagcttgataagatgcctttagtatatccaaatatgcaattgagtgaggtggtggaagaacacccctcactcattcccgtaatcaaccggtttgggattcgtctcgggcttggcgacaaatcggtgaagacgctctgtgaagaacattcgctggatacggactttttattgacagtgatcaataccttcctcaacgaggagtattttccggagaagaagttacaaactttccatacatcgcagattattgattacctgacaaagacgaaccaatactatttacgttatcagctccccaatatagaacgccatctaggttcctttatctcgatgagtacgcccggcaatcctactcttggattgataggacgcttcttctcctcgttcaaggaagaactcatcgcccgcattgagaaagatgataagatatggtttccctactgcatgtcgttaagtaaaaagctgggaaaagaaccggcgggaacgatcgatggattgcaaatcacctccgagcaacgtacggaagataccatcgaggcccttttagccgacttaaaaagtatcatggtcaagcatctttcgggagattacgacgagaatttatgttatgccgtcctcttctccatctgtagtctggagaaagatatcaaacaacacaaccggatccggtatcgaatccttacccccatggtctcggccatggaaaaattatgtatctaacgatctgaaatgcatcgaaacaaacaaatagcgatcatactgtctgataccctaagaagtattgggctgcaaagcttgctgaccgactacttccccccggtagaggtttgctattttccaaatttcgagatgctttcctccacaggaagcgacacctacgattactatttcaccgattcagatacccttgtgctcaatgcggatttcttcctcccgagaagaaacaagaccgccctcctcatcgacagcaccgaagaacacggggcactctcgtctacgaaccgtatcacgttacgttcctcccaagagaccattatcgagcaattgcaacaattatttacgagcgacagctccggcaacaccactaccgaaaacaacaaggacctatccagccgtgaggtagacgtacttcaactgatcgtaaaaggcatcacgaataaagagatcgccgataagctgaacatcagcctgaacaccgtcctcacccatcgtaagaacatcaccgccaagctgggcatcaagaccgtatccggcctcaccttctacgccatcatgaacgggatcatctccggcgacgatatcgaactatagcgaaaccaacaaaccagctttcaaaatcactacatctagtgattgaccatcctgtttctttaccgtttcttcgcgattgaaaaaatatactaacaaaagaaattcgatgaagagacactacttaggtatcatcgccctaggtgcgttggggctgcaaaatgtatacgccgaggacatcaaggctaacgagaacgacacgataaaaacctataacatgggtgaggtaatcgtgacctcatccacgaaggagacgaataacctccgtacgttacccggttccgtatcgatcctttccccacaaatgatctccggcaggcagatcgacgcattaaaggatataagttctttcgtcccgaacctatacatgccggattatggggcaaaactaacctcggccatctatatccgcggtatcggagccagaagtagcggacaatccgtaggcttatatgtagacaacgtgccttatctggataaaagcaccttcgatttcgagctgaccgatatccagcgcatcgaggtattacgagggccgcaaggaaccttgtatggtcgtaacgccatggggggcatcgtaaatatctataccatctccccgttcgattaccaaggaaagaaactctccctatcggccggaagctacgggcaatataaagtcaaggcctcccattatgctaagttgagcgagaccatcggatttaccgccgccgcttactatgaccatagcgacggcttctacaccaatgcctacgatgggaaaaagatcgataaggaagacaacgttggcggtcgcttcaagttggaaggtcgcttcaatccgaacttccgtgcctcctactccctttccgtagattatacggatcaaggagcgtttccatatggcatgttcatcggaaccggaaataccgatcacaagtatgtaaatcctatcaatatcaacgatcccagctcttataaacggacggtcatcgccaataacctgtccctcgaataccggaatgagcacgtgatactgagcagcatcaccggtcatcaatatttcaaggatgacatgaagatggatcaagacttctcccctctctcgatctttaccctcaaccaaaagcaaaagcaaaacgctttcagcgaggaattggcgatcaagagcaacacgaggaataattaccaatggtccttcggactctacggtttctacgatgatctacatacggacggtccggtcgatttcaaggaagacggaattaagaccgttctccagcccgtattcgatcaattgaagaaagatcaccctaagatgccctatctaaaaatactggacgatcatctttatattccgggttctttcgacaccccttcttatggccttgctttgtatcaccaatccacttataacaatctgttcacggaaggcctgtcaattaccgccggtatccgcttggattacgagaagcaaaagatggattacaattctgaggctaagatgagaatggggttcggcttcgtagaaaacggaccggttatcgacatcgagaaacttttcccgatcccaaccaccgtgatggacgccagtgtctcccaagacttctggcaagtacttccgaaagtctctttaaagtacgaatgctcgtcaaacacgttcacctatgtatcggtagcgaaaggttataagaccgggggctacaacgtacaaatgtcggcagacgtgatgcaaagccagatgcaatacgatatgatgagcgctttcaaggacatgatgccgatcgaggtcaaagaacctacccccatcgaggaagtagccgcctacaaaccggagaaaagctggaactacgagatcggtatccgtagcgagttgctattccaacgcctaagcgcagaattaacaggtttctatatggacattcaagacgtgcagttgaccaaattcgtgaacagcggcaacggccgtatcctcaccaacgccgggaaagccaaaagctacggtatagaggcctccttgcgtgcccgcatcatcgatgggctaaccgccgacgttaattacggtttcacccatgctacgttccgggattacaacaatgggaaagaggatttcaagaacaacttcatcccatataccccacgtcataccttcaacgtaggactgcaatacacccgcctgttccgtaacgcatggatagaccaattctccgcctccgcccaattcagcggtgtcggaaagatcttctggaccgagcgaaacgacatctaccagaaattctacggaacggtgaacgcaaaggtaggcgtacgcaaaggtatcgtcaacgtaaacctatggagccgtaatataacgaacacccattactctgcattttatttcgagtcattcgggaatccgtttatccaactaggtaagcctttccagatcggtgcggaggtggcgatcgccttttaagcgcaagcgttcaatagaaataaaaaacgggagagccggctattacaccaactctcccgataacattattcttacttttcagtcttcgacagcctacagagcaagagctataatacgtctcttctagtaaacgaatccccctatatatattccatccttagcctcgaatataaaactatacagatctttttatagattcctcaaaagaaaccacattatattttccatcaaaatcattacttaatgacaaatcataagcatcatcatcaaaagcacgttgtacaaaacgaatcagttttatacctagccatacgaaaggatttaataatgtagtcaaccatattttatgaccactatatttcgctatagcatttaccataacagaagtggaagcgtactctatattctgcggacaaaaaatccccttagaattattatcaatcaacagtctgataaattcacatagattatcaataaaaatcaagctctttctctgcggataatcaggaaacacaggcaacttttgcccgtatttcactagtaaaggataattccctttgcaacctttaccatatatcgctggtggacgaacactgcataccgcaaacgaatcgtcattcatggattgaataactttatccgcctgcagtttactatctccgtaaaagctagaaggattctcattattcttatctgtgacaataccacaatcatctccataaacgttcattgacgacaagaaaatgaattgcttcactcctgactctcttgctgtttggcatatatcaatcgtcatatcccgattaatcgaatagaacaaatcccttaagtcttccgtaatttttatatgagcaataccagcgacatctatcactacatcaaaagaagagaaatctgttttcttccattcattatttattgttccaatagaagcaacttggtattttgaggggaatcggtttaaccagttttctatatttgtcccaatatagctaccggctcctgttatcagtactcttttcatagctaacattataatttaatcaaaccatcctcattatacaaaatatcccaatacttacgtaataatttggtaccatattttatctctattggcggtaattcctcacctaataattgtttcactctcaaatacggtaaattcaaaccagctccagcatataatacgatggtagcagtgacacgcggattcaaatctgttaaccatggagtatcattctcatctaacataaaatcaaaaccaatattaccatctaagtttaattcacgcacaatatctttacatagctgataagcatcgcttttcttttccaccacactactttgagcgatactcatagaactagtcgtatttcttctccccgcaatgtacaatgtatttccttggtcagccaaaagatccaccgtatattctacacctggaagaaattccatcgctatcatttcaggtataggttggcatccatctattatctcgtacatttcctctaatgtcacattctgagaagaaggcttttcatgcataaataaatctgatttcgacaaattagcacgtacgattcgtaccccacgactaccactattctgtgtcatcttaacgcaaacaggcttttgaggataacccaattctccgatacgattacgaagtgttttggcagaatctaccaagaaatatttcggcaccaccaaccctttatccttcataaactcataaagctgatatttactgttagcgatttcaagtgtttcattattcgagatagccacttttacatccagcttcttaaaatcatccattctttttagaatggaaggaagttccatagaaatatgcggaaaaaacacatctaccttttcattcttacaaatgttcagaagaacatctacaaaattagaatcagtatatttgggaacttgataatatttatccaccagcaaattcatcgcaggatcattggatatatcgcaaccgacaatcttgatatttctttctttatttgctttcagacatttgaagaaacccggcataaagaatgctccacacgccgaacttaatacaactatatctctcatggattctagaatttaaagctaaatttattgaatacgtcatcgaaagtctctgcccgcataatctgttccacctcaccattggtacgcaggacatacatggcactttgaggtttgatgaattgtggcttagacacaatggaataaccaccaacattgtcgaacaccaaaatgtcaccttctgcgatagattgttcaaatcccggatagagtacatcttgttccaaacatgtgaatcccatgatatccatattagtataagtatgctgttccttacctcctgacaaaacagttaccggcaattttttcatagtacagatttcacccaaattatgataatcaccatccatattagctatatatcgtccccttacctctttaacgctaagaactttcgttacaaaactcaaataacgagctaccacagtagtaccaggctcagtaaataagataggttgattttccacatctttataatggtcagcaaaaggctggatcgtacaatccgcataatcttcataagtaggcacggtatcacccccaaactgttgtttcaaaaattcaggcatatcagcatacataccgcttcccaacgaaatataagctggaaccccgtcaatatagtcatccgccgctttcaacataatctccgtacgtttagtccaagcctccacacctcttgagcgactgatatgacaatgcagaccgatcaaattcagattgacagtttctttaattaaagaaaccgtttcctgtaattccttactttctggcactagcccaaaacgagaaataaaatcccctcccacatgcatatttatacgaataccaaccgtataatttctatcaggatgccctttaacataagaaactatacgcttcgcctcatctaggctatctatattcaatataccttgatgttctaagtgatcaaacatctcctctccttttgaggggccattgtaaacaatctgtttgttatcataacctaactttttagccagtgtatattccatatcagaaactacctcggcatacccacccaacgatctaaccaattggcaaacaaaaggagtataattggtcttgtaggaataagaaagctggtaattaggataaatagccttgaagataccttccagctttctataattatcaatgaagcctttttcatcaaacagataaaaaggagtaccattactcttaataagatttctaatagcttgttccattagtataacatatttatttcattatttcattggttcgatactctttcaaatgaggtctgaaatcattaccataatcattcgtcatacgcttaattattatactaaatgtcaagaaaaacaccttcaaatctaaccataaagataaatggttagcataatacacctcatattcaaattgttcctcatacgttgtaaagaccttgccagacaagctgtcgggaggaatcaaacctccacgtacgctatgacgtgctcgttcagattcattgaaatacggaagatcatccatccgaagtggacgtggaccaacaaaagacatatcgccaatgaaaatcgcccatagttccggtaattcatcaagggaggaagaacgaatcaaagccccagccctagttacacgttgtccctccggaagtaaattcccctccttgtctcgtgcattggtcatcgaccggaacttatacagcttgaaaggcttttcccctttaccgatacgctcttgagagaacaagatcgggctacccatagagatcctgacaataatagccaagacaagatatatcggcaacagagcaatcatggcaatgcctgacaatacaatatctaaaaaacgtttaaagaaatatctgtacatactaactaatattctcttaatacgatttcaaagctttcagcatagttcgttccccactggctccccctaacagcagcaaggccagtaatatattcggcactacgagggtgcggataaggacgcatcactcctctgtacattcccaatgccgtaatcttggcatccacaccctcttgaccaacttccacgtaacaattaggacggaacagattcatagcgttattaatagcccattccgtgcagcttggtacctccatataccaaaactccttcacccgtttcacctcgggcctacgttggaacaaacggatagcttcctgacaagccatggaagtctgcaaatgatcattgttcgtatcagcgggatgatgcgtaatgacaatatccggcttactctctttgatagcactttcaataaactgcaccaatttcaaatgcggcaccgtattcatctcgatattagggaaagtcgcttcaaatattctatccactcccaagtatttggtactggcattcgtatcatcctccaactcattatcatcgggacggaatgcacgagctttcgcttctgcacacatgataaccacatctacaatgtcgccattttgggtccatctagagatagaagctcccgcacccaaaacctcatcgtcgggatgagcaactacaattaaatatttcatggaacttattttactcttttatccactttagaaaaaacttcatcaacaaaaccaggaagagaatatctgtataatatagatggatcaacaggtttaaaatctgagaacaagaactccttaggtatattaatacattcaagattaacaactaaaatattatctggatcatagaaatcatatttcattacttctgcattattagtaatatacttcctgttagcagccatagcttcatatggcctcggagatagaccgctctgttcagaataaacaatatcaagaatgcatttactttttctaacaatttccacattttctaaataactcatcggcttaaattgcattcttttataactaacaaaagttcccctacgaataaaatcccacaaataaagtgtccagcttgccatatacagaaaaaagaatgacttgatccgatttatcacaaaatactcttgaagtctttttataacaccccatctattgttataaagtgtacccacaaaagatacgtcaaagctataatctttttttacagctatatcctgatattcttttaaaaaaaatagaggtctaaatttaaattgaggattatttataacatcatcagtgtcgaaagaataaacatagtcatattgtttaaggatctctggtattttttttccacataaagggtcccactgaaaaaagatgaaagtagattttggaaaacacctatgaagatatttaagtactttcacatcaaatccctgcccccttattacaaaaattatatcaggattaaaatccttattgatagtcacaattcttctaatgtaattgaagaaatactgtggcactacctttttaaacaaatacatatatatttttgtgaaagaagcttgtgacggacgttcgtcataaacacgtacttccgcccctctactttccaactctgtaacacaaccatctgtataatgtttacaggttccaaaaggagaaaatagcaatactttttttcctaataatttttccatttacttaaaaatcaaaaaacaacctctttatatccattcaaccatctatggttcatttctccatagccttgttataatcaaattcacgactaatacactccaaattcttataaacctttatccttttctccaaaccattttatctaccaccccggtataactctgaatcagtttcaccacctttaccgagacattctcatccatatagttaggaaccggaaagcccaacgctccatctcggttcatctcaacagccacatccaccgcttgcagtacctgctccgtcgtgatgccagccaagataaagtttcctttgtccaatgcctctggacgttccgtacttgtgcgaatacataccgcagggatcggattgccaatagacaggaaaaaactgctctcctccggaagcgttccggaatcagatacgaccgcaaaagcgtttatctgaagatgattgtagtcatgaaagcctaagggctgatgttgaatcacacgaggatcgaaccggaaaccccgttgctcaatatatttcttagaacgaggatgacaagaatacaagatcggtaaatcgtacttctctgccatagcgttcactgcgttcatcaagtcaaagaaattagccttcgtatcgatattctcctcccgatgagcagaaagaaggatatacttgcctttctccaatcccaatcggcttagcacatcactagccttgatccgctccaaattattatgcaagacttcagccattggagaacctaccacataagtacgctccttaggagtacctgcggcattcaaatagcggcgagcatgctcgctgtagcaaatattcacgtctgatatgatatccactatacggcggtttgtttcctcaggaaggcactcatcgaaacaacgattaccagcctccatgtggaagatagggatatgtaaacgcttcgctcctattacactcaagcatgagttggtatcacccagcacaagtacagcatccggttttaactcaaccatcaacttataactcttatcgattatgttacccattgtagcaccaagatcatcccctacggtatccagataaacctctggatccgccaacttcagatccttgaaaaagatcccgttcaaattgtaatcatagttctgacccgtatgagccaataccacgtcaaaatattttctgcacttattaataacagctgccaaccggataatctccggacgagtaccaacgatgatcagcaattttaatttcccattattcttaaatgttgccatcactattcttttttaacaggttcaaaataggtatccgggtggttcaaatcaaaactctcattcgcccacattaccgttaccagatcctccgtatcggagagattaataatattatgcgtataacccggaagcatatgaaccgcctcaattctatcaccactcacatcaaactcaatcatctcgtctgtaccgatctttcgctcttgtatcaagccatgaccggaaactactataaaaaactcccatttgctgtgatgccaatgttgccccttggttataccaggcttagagatattaatactcacctgtccacaattcgtcaaacgaagcaattccgtgaaactaccacgttgatccacgttcatcttcaagggaaaagccaccttctccttgggtaaatagctcaagaaggtactatacaactttttagcgaaactattgtaaggtatctccggaactatcaagctgctcggctgattcttaaagccttccagcaatcgaacgatctcacccaaagtcaccttatgggtaatgggaaccgcacagtaacgaccatcctctttcaacaccgtctctacaccatcaaactcacaacgatgctcctctcccttcaaggctgctatcatctcctccactaagtcatctatataaagcagttccaactctactgccggatcattgacagtgataggcagatcgtaggcaatattattacagaacgtagcgacagcactgttataattaggtcggctccattttccaaacagattcggaaaacgatacaccaacaccttcgcccccgtctcctcaccatatcggaacataagctcctctcctgccttcttgctcttaccatactcagacgttccgaaacgtcctgccaacgtagcctgtatagaactagagatcataacaggacaattattctgatacttcttcagcgtatcaagcagtgtagaagcgaagccaaagtttccttgcataaactcctcatggttctgtggacggttcactcctgccagattgaatacgaagtcacaatcactacaatatcgttccaactcttcctgtgtcgaatcaatatcatactcatatacggcacagacggtcagatcaccataatacctcgccttgccatcccgtatatttttgagttggcaaacaagatttctgccgacaaacccatttgagccggtcactaatattttcattaaaaacaaagatttattaattaagaaaggaaattactccgaacggatctccctgcccttagcacaaggcaacagcccaaggtcctcttggataaaacgtaaacgcatcaatagcttcttcatgccctccacatctaggcgtgcggtattatggctatggtaatcctcgataaccgagacctcctcgttaccctcggtaaaaaacttatcataattcaagtcacggttatcacaagggatacgataataatctcccatatcaatcgccttagacatctcctcgcgggtaacaagtgtctcgtaaagcttctcgccatgacgggtaccgatcactctcacctccgtatctccatacctaggatcaaccttggcgtaaatctccttcaaggccgtagctaaagtaaaaagcgtagcggcaggagccttctgtacgaacaagtcaccattctcgccatgcgtaaaggcataaaccaccaaatccacggcatcatccagcgtcatcataaagcgagtcatattcggatcagtgatagtgatagacttgccatccatcatctgctccacccacaaaggaatcactgagcctcgagaagccatcacgttgccatagcgagtacagcaaatagtagtcttcgcattagcacccaaggcacgtccctgcgcaatagccaccttctccatcatcgccttagagatacccatggcattgataggataagccgccttatcggtagaaagcaccaccacgttcttcactccatgatcgatcgctgagagcaacacattattagtaccctcaacattcgtacgcacagcttccatagggaagaactcacaactggggacctgctttaaggcagcagcggcaaacacataatctaccccatccatagcgaaatccaccgcttcacgttggcgcacatttccaatataaaactttaccttatgagctacctcggggcgttgcgcctgcaagaaatgacgcatatcatcctgcttcttctcatcacgcgaaaagatacgaacctccttaatgtcgctatccaagaaacgacgaagcacggcatttccgaaagagcccgtaccacctgtaattaacagggttttattttcaaatacagacattatatatcaatgattaaaattaattagagtacttgttccacacgtttacatatttccttgatcaagtcttcattgttcgtagatctgccttttccccacatctcatccaatatccaagttcgcctttcttcagaaatctgtagcgagctgctactttctatcgttgctagcaattgcttaaaatctgaagcatgtactcctggtgtaaatgtcttatagtcacgaaagaatccgaattcgtttttcgcataactatctacgtcgaaatcataatggataacccctttattgggtaataataaatagtcataccaaatagaagaatagtcagatatcataatatccgtaaaaggtaaaatcggatacaaatcaatattggcatctatataatagatatgcttcaaatccttatatttaaacgtatcatacttcatggaaggatgaagcttgagtaataatatggcatttatttttgaaaatgccttattcaaggcatacagatcaggaaaggcatagtccataaaatgcgtaccatagttgatacgccatgtgggcatgtaaacaaataccttgttatacttccgtgaagtatgaataatatccaacatcaaggggtcttctttttcttcgatatagcgaagcaaacgctcatgatccatcatcataaacgaacaacgaggcgacataccatgatacaatacttgcggatcaaatcgaaagaatcgcaagtactggtcatctatcgttggtgtggttgaaaaaaacaagccatattgttcatagacataaggcatacatacacgtgaaagaaacgatcgatctgctggaattgctttattgtcaaccatcgctttcaaagagattccatgccacagattcacattgaaaactcttccggaagtgaaaaaattgatgtgatttgaatttaccgtactgacataaacacctgcggtcaatgaatgatataatcctttaaggctatacttataatatgcactgtaagacaatgctcgtaaacgtttgaccaacctgcgtgaggaagttatccagatcgtttggatttctggatgctgttcctgcatataaataaagaggtatttagtattatccttaaagatctttttgttaccaaacacccatttttttttgttcctaggagtacaataagaaatcattaggaaaaaataccctataaatacataaattacctcttgaataagttcggaaatactatgtcctttaaaaataacattaagaaatttcatatgatacctatctataattatttataagttgaaataagttttgataagatagttttcaagtcattttggggcgaccatcctaattcctgcagcttagcggtacttaatcttaattttgtttctggggcataccccatattatcatttaatctaaactccacacttatattaggattaaagttatctcttagaagttcagccaatccccttgctgaaatataagtatctgcatttgctatattatacgcattgcctttttcacctttgagtaatatataaagtatcgctgaaacacaatctgtagtataacaatagggtcttgctgctctaccttgagtatgtaaaataatattctggccttgggatgcaagccgacaaaattgtgtgataacacggttatccgtactactcacattaacccctgtagtctgtgtcaagcgagccaccattatattcaaattatactcagtcgcatacaacgcacataaattttcagcagcacgctttgccatcggatagctactacgtgtcgccattggatctaaatagccttgaacctcttctgtcacaaagtttaaatcatccaggatagtaccatacacttccaatgatgataaatagacaaagccttttaccggaaaacaccttacatactccaataaaacttgcgtacaattaacaatcgtattaaatgtttctactggcttttcgacaaaaaatttacttgaagtaggggctgcacaatgtacgatgaaatccacttcaccaatttcactataatcaaatgaagacaaatcgcactctataaaatgtatatgagtatgctcctcgctttcatacatatcttgcgctttggctttacagcgtacaggtgcgacaatacgaatattcctgtttaacgctaataaacaatgtattaaagtagaacctatcagtcctgttcctcctgtaataagaaaaattgtatgaccaagctgtgcggaaagcccaaaagatctcacaaactcctctatatcttgtttaataagttgattcataaattaaaacccaaaaatttgttgattctcatgcacctctaccatagccctaaatataaaatagtcggtaggagtcgtaattttaatattctccataggcccctctatggttgccatcttatacccaaaataactcatcatagaacaagaatctataaaagtaatgttaccattttctttattctttctatggatacttaggatatcctttaaatagaagctttgaggtgcccgggccagcaggcaagaagaacgatcgggaatcaccatttgtccctcctctttctggatgacaaaagtttctatggcaggtacgacagttatggcacttcctttttcatgtactttttcaatattccgtgtaattgtctcatccacgatcaaaggccggaccccatcatgaataagcaccacggcattctcctcacccttatctttgcaataatcctccacggcacaaagacctctatagatagaatcttgcccagaatcacctcctgacacaattttaaccaccttgttgatctcaaacttcttcaacatttttttcaaaaaaggaatccacgattcaaggcataccactacaataccatcaatcaaagggtgattgtcaaaaagttcaagcgtataaatgataataggtttaccccttaactccagaaattgtttaggtttagacctagtattcattcttacaccggatccccccgcaaaaatgactgctatatttttcatgattaacaaaatatgaaagctaagcttctattaatttttccaataaagccaattgactatccatcgtattttccggaaagagtgcttctacctcttcaaaagacaatctctttcctttcatttgcttacaaaactcactcactcgctctaccgcatccgcatcatcaggaccaatattaatacctaaggggtatttctctaccattgcataatgaacgtctttcaattgatagaaattaatgatcgggcgacctgtagaaaacaattctaacattttactaggtatttgcaagctgaaattatttcctatatttatcaaaatatcatattcattataaataagctcattatatctacttctattaacagccgggaaacttttaatagtttctgacaaatacttatctacaatactattacaattactataactaatataaaaatcgacatgaatatcatcaatttgagataagacagataatgcccgctccggatttcttctatctgcatacaacgctcccgcataaaccaatctacatttcccttcatttacgatttgttgaacaactgatttagataaggagctaagaatatatttcatcacaaaagttttctcattcggttgagagaagtcattcaaagccgaatgataaagttcttctgtaaacatattaaagtcagctatatcatacacagatttttcatttttataattacgaatttttcttctatttggaaaaaaaacatacttatatttagaaggttgaaaggtaaatggatctgttataaaagtaatccattttactttaggatgcttaagcttaaatcttcgggatgcaaaaacagaacaaatgggattaaccacactaataatcacatcaatcgtcttatcttgatcaattttttccagttcatgataaaatggattcatttgccaaccctcaactgtaggataactgattggtgacaacaataaagacctaattctaaacaaatcaacaactaccttattaagcataacattacgaccattccgtatattctcttcacacaacatcctccatttccacattcgtgaaaaaacaaaatgcagcttaatcttaggatcatttaacggttcaaaatgaacctgacttaatggacaaacaacatcaatagagtgtttattttttaatatttgtatatacttatctatgcaggctgaagtcgctgacatatttggataatacgcacctgttaaaattactatattcatgattatatcttaattaattctttttctataacatccgataatcacaggatattataaatatcatgagtaaaataatatctaattattcctaatcctttcattataaattatttcaacttataattatacatttttatatataaaaatatcattaaaacgcccatagacatagaagacaaattaaaatcaatgactgaaagaatcaatgacagaaaaaatatattcaacagtatcattgaagacacattttgataacgataaaaccaacaaatagactttctcataagaattccgaacaggaatggaaaaacgatcattcctacaattccaaaatccaaatagaaataaaagttccaactgaataaggcattccaattcttatcaaaattttgtctcgaaagtgtgatccatgtatcctgctttaaaatgacaaagtcagagaaatttgtaccataactaataccaatcatcctaaaggcgatatctagtaatccattaaaagcattaaatgtcaaggttccatagctataaccacctagcttatcaagatagttattattcaaggcataatcgaatgcgacaatagggccataactataactcattaaattctctgtagtcatttccactcccacatccaaactttctttatcaaattccatatatccacgccttccagcaccaattatagttagcaaaaaaaacattgcagcagacatcactaggatcaaaagtcccttttttaatgtaatcttaaatcttttaggataaaagcaatatccaaacaacaataaaggaataaccaaatatcgaaaataatcaattcttcctccccctaaagatgacaagctaaacaacatgacaaaaataaggagtaataatttagatctataataaagaacgccaaagccaaacaatccagcgcatagaaagctgaatggctttaaaatccaataattcatattggggaatagtgccccatatatattcaaatctcctgactcaaaatataaattccggatctgatacaaatcccccaaagccataaacgtatagaatttatataagagatataaactataacacgtcaatacaactagaactccaacaaatagcttattcttaaaaaagccacgtattgaaagttgaattccagattgctttaaatctacagacttaactggacatttaattaataaaaaaccacctatcaaggcccaacagctaatacacaaacagaataacgtttcgaatttaggaactttataatcatacaatcctagcgtagacaaaaataaagaaatgaaccaatataaagaatacaaataaagaattctttttgatggcctatctatattttgaatcttaattatatagatcgttatcagcgaaacaagtagtataaatacagtcagcataaatattgattatttatcaacctttaaatagtatttttaaatcattaaccatatccttattatttaatctttgcactatcttatcaactataatattctggaaaatagtaatcattaaagccatcccaaagaccaagaaaaacctttgagcgaaagagatattcaacttagtggcaaagtccaaaatgggtatatgccaaaagtagatccaaatagtatgtgaacctatatacttgaagaaatccttcaaaccacaaaaccttaatacatcgcatatcctatgtcgcacgacccataacaacaaaatgcacatcatggcataggatgtataatacaagcgaggcgggtacttatacacacttgtttgcactactctcccttcgatcgaaaaaagtgtaaccgctaacgctgtatataaaaaaacggagacagccaataataacattacgtatttataatggacacgccacataacgctacccaagacaaaaaagagaatatatggaatattgagaatgatcagataatataagtaactgtctgttacttgagatatttcctcataaacaatcaatgtaaccgtagccacaacacaaattttactcaaactcatctttctcaccagggggtagataaggggagcacatatagaaatcacaaaaaacactcttatgatccaaacataccagcccgtatagaaaaaagcgtttcgtaatacaaattgataatcgatccatttatgagtgacgatcgtgaacagaatactatatatacccaagaaaatccaagtcggcaaaatcaaccacttgaatcttttgataacatattttaagtaccccccgtcaattaatgtattttcatcttttattgacaaggtataagatacgccggaaaggaaaaccatcaaaggaacatcaaaattacggatctgacgaagccatagggattccggttcgcaatgaatcacaacaattccaatcaacgctatacatcgaagtatatctatagaaatatctctagccatatttttcagtaaattctaaaccaatattctccgcatccgcacaagaatcgcatctaccttatcccgctccaaggcggtcaaggagtagcggtaggcggtataggcaaagagggggatggagaaagcgaacgtcatcaagaaacggaatggaaaatccatgaaccagcaaaccaaccaacagcaaaggccacccgccaatactggaggcaagcttttcaagaaaacggcacggcaataggcggctccattgaatcccccttccctacggagtagcggaatgcgcaaccacatgcagaaagtctctaccattaccatcaagacagcgataacgatcaatgatcctccttctcgcaacacccaccaactcaaagggagaataagcagcttgggcgtataggtgacgattgtataagtgccgatctttcccatcgcccggttcgccaagcctaagccggaagtgagcatatccacgatctgcatcatcagaaacatactgccaaaaagcaccgtattcctcggcacctccaccagccaaagttccaataagggacgcatctcaaagagcgtaggaacacctaccatcgccaagagcaaaaaggaaaacttactttccatctcagccaacagccacatgtgcgaccggttgccgctaccttccgatgccatcaactggggagcgatcgcattgctaaaggaggaactgacaaagctgaccattcccgagatctgagccccaatgccataggcagcattcacggccgtacccattacccggttcaatacaatagccacgccttgattgcgcaaggcgatgcacaaggcggagtaggtaatccaacccgtaaaggagaaaagttcttttacatagccccagctaaacaggcgaaggcagggatagacacactcctcgtatttacggtgcgaatagatcgcaaaggccaataggttgaacaggctgatcagcattatgatccagccataagccaccaagctgtccaaaggtataaaagggagcaataccacaaaaaacaccttcagcaccccatcgagcacatcgattaaggaggtgtaaactatattctccctcgacaccagtaatgcccgatagggagcggcgataaaggagatatagaccatggtaatgacctgctgataaacaatgactgcggcctcctcgcgcccttccggtatattcaagaagccatgaaacaggaagggagccagcgactccaaggtcaacgtgatccctagccccaaggcgatatggagcaagagactgttactaaaaaccgcttgcagacgttccaactccccccgaccctgacagaacgaaaggaaacgctgggtacttcccaccaacgagttggtaagaaacgagagcatgctcacaacacccgccaccaacgaatagattccataatcatctacgcctaaaatatccagcaccagacgggccgaataaagcgaaagcaatagattgatgatggtgcgcacatattgcgccaatgtatttacgataattctgtttgatgctcgcatatcaaaaaggtctaactttaaaagacaccgtctcaccgatccacaacaactcattaggggcgatatagttcataatagcctactagcgagataaaggtcagctcacccccaaattaatcttcgtgttcaaatcccgtggattcgtccaatcaatgtcgtgatgcatcgagttcttataataatagttgaccaatcgcatgggatcctccacagttcacttcgtgtccctccgggaaatataaacctagcgcatcaacatcaacggatagagcactacccgcaggaaattctttacttttggattcatttccttaatttgctattttagcatcagcctaatcttcttaggtagcctctgtaaaagacgatatttgacaactttcatcaacattctagtttgatatcctcctaaatagtataacaagaactgaatgggatgatgttcttcaactccataaggatcaacctgtgaagtatcatacaaaaatatgccctcaccctgaatatgcttctttacattttcttcaataggtcttaaagctaatgcgtattgattcaataccttataagtttttttctctaccgaaagtaaatagcgtttggatacatgcttccttccaccagacaaatcgacacacaaatcttcatctccaatccccacatatttgcccatatgtaaagggttcataaatgaatcatattgtactagttcattaacaggagcaaagttgcatgacttataacaattcacaattgggacttgagctacaggatttaatgtcatcgcatgctcacctatttcagaaaaattcgttgtataagactcatatggtgataccacaaacttaccgttttcaactaaaaacgcataaaaatatttagaccatgctcttgtatagctcttaacttggtctggaatatcaatattttcaaaacgtgtgtcatcaaaattgtctagccaaactctaaaatctttccacatcctagttgtccaacattggccccatgtgatagcaatttgaatcgcatagacactataagcacttttacaaggagtaaatctcatagaaacaacttcattcaaagtcttagcgtataatgcaatacaagcagcattggagtccttatcataataggaacaagcgtctaaagcataattgtagaaacaagggcttacatatatatcatcttctaataagatgatacctttaaaatatttcgtcaaatcaccacaagagaaaatatgctgttttaagcctagtcttttctcatggataattacatacttttctccaaaaggccatttataatcatttacataagaatttaaatcatcatttcccccacaatctatactaagaaccaacggaatatcactttctctgtaatttgccgcttctaaggacttcaacagccgttgtatgggatacaatcgattgtatccaacaactactatcgcaatcttttctttgtttaaatcagacacaagtctcaacatatttttcacctctcccctattcgggtatacacgaaccctagcttttccaattcctgacggttatagatgtttcggccgtccacgatcacgttgccacgcattacattcttgactacattccaagagggcaaacggaattgacgccattcggtcatcaaagcgaaggcatcagccccatccacgcaatcatacaggttctcgcaataggtaacagagtcgcctatacggcgcttgcactccgacatggctaccgggtcaaagactttcacctgcgcacctgccaccagcagttgctcgatcactaccaaagccggggcctcgcgcatatcatcggtctccggcttaaacgccagtcctaaaagagcgatggtcttacctttcacatctcccagaaagtcgacaagctttctgaaaacaataaatttctgcttctcattcacccgctctaccgcctcaatcacctccagatgcaactcgttctctatcgccgtatggatcaaggcctttacatcttttggaaaacaagatccaccataaccacaacccgcatacaagaatttggttccaatacgggcatcagagccgatgcccttacgtacgtgatctacattcgcccctaccaactcacaaagattagcgatatcattcatgaaagagatacgagtagccaacatcgcattcgccgcatactttgtcatttcagcggaaggaatatccatgaacaagacacggaagttgttgatcaagaaaggctgatataatcttgtcatcacttcttcagcccgtttactctctgtacctaccacaacacgatccggactcataaagtctttaatggctgctccctctttcagaaactctggattggaagccacatcaaacggtatatcctcaccccgcttctctaactcctgccgaatagcctcttttactttttgtgccgtacctactggtacggtcgatttagtgactaatatcgtatatcgattgatatatttaccaaaactacgagccacctccaatacatattttaaatcagcggatccatcctcatccggaggtgtacccacggcagaaaagacgacctccacctccttcatcgcctcctttaaatttaccgtaaaacgcaaacggccatattccatatttcgtttcaccaattcctccagtcccggctcataaataggcattaccccattttgcaagcattggatcttctgctcattcacgtccacacaagtgacgttcacacccatttcagcaaaacaggtgcccgacaccaagccgacatagcccgtgccaacaattgcgatattcatatctttttgatttatgatttttgattttatagttaaggcataagtaataagcaccttatcatccaactattcagttgaaagcatcgagacttaccggtttctattaatgtgtggcaaaatacggtggtttaaatttatctagattacagttcttctatatatccagaaacatactcttgccgtctcctgcacatatcaactttacttcattgccctatacatctcacagaacgttccttccaattccttattcaataacccaatcccccccaacgtatgccgctcactatcaaaattaatcccaacctttacgatcggcaacccacaaagagcgaagcgctccgggtaattgcgcaaattgatttgctcaagagctatatccgcagtcttgttcaacttcaactccacgacatagagcgttgtcagtgtgcgtatcaccatatccacacggcctttcggggtacggacttccacgttcacatacattcctagcaggctgaaaatcgtataaagcaaggactggtaatggccctcataatccgtattgttacattagaggatggtggaaaagataggtctgcaacaaacgcagagcgtcgtactcgttgatcaagacaaccaccttttggctggtctgggcgtaggcccgtttgatgagactttccaaacgttggttcgtcaaaacaaatataacgttccctaaacgatcaattttcaaccctctatttttccattccacgcctcatcgccctatacacctccttgagcgccccggccccataccccatgaactccggttcatccatctctacgcatagttcttgtaccaagcgggtcagactctggggattgatactctttttttttcgctttgctgtaggtggcggtgcctacgtgggcctccgcacaaaactcacggatggagattcctaaccgcttacgtggaaattccactaactcatcaaataaaatctggttcaaatctaaattttccttcatactatgctaatttttattaaacaatcatccgatatttcagcctataggctgaaacgcagaatcaattattagcaatagctttagaaaattaatctgaaatcctattgatatggaccaacaaatgtcttacttccttcctcccatcaccaacacgcttcctaccgggaactgtacactacgggaagtgtaccgatggatcaccgaggataaatctctcgaaacggttaccaacgaattacgcgccttcatccgggaaggcagggtagcggaataccgccaactcaaacagcgacaactgccgttcgtaacgccccacggcgttttttcccgtcgtaagagcgacgctctcatctccgcctcggggttggtagtggtcgatatcgaccatctcgcctctctcgaggaggcggaacaactccgggaccacctcttcgaggacccctatctcgggacccgcctcgcctttgtcagccccggaggacttggagtgaaacttttcatacccggagacgagaccgttcgatgggccatgagttacatacagctcctgtatgccgacaccttcaaaggtgaggtggatacctgtggcaaggatatcgcccgctgctgtttcttgtctcacgattctaacgctaaaatattcataccatgaacaacgatctttccaaactagtagaagcggtacgggcggcccatgccgacatcgcccccacctacgccgagtatgtacaattggctttcgccatcgccaccgattgcggggaggcaggacgtagcgacttcatcagtctctgcgagccatcgcccaagttcaacgccctacacgccaacaagcttttctccagtgccttgcgcaccggaaaccagaatgtccatctgggcaccgctttccacttggccaagctggcgggcgtggaaataggtttcaagtttcaaggtttcacgaaacccttttcctcacacacacgtgtgagtacatataatacagccgatacggtagatcaagcccacgagaccagcgatcgggaaaccgaggcaaacgacaccccactccacatcggcagcgagccttacacctccctgccacggctggtacccggctatccatggccctcgttgctacgggacatcctcggtttcgccgataatgccgaacagcgggatatccttttgctcacggctctcaccgccctaggcgccaccttgggcaagacagtacgttgcctctatgggatgcattggatctatccctgtatccagctcttcgtgatcgctccacccgcatcgggtaagggcatcatggcgtggctgcgtaagtttatcgagcctatccaccgggagatccgccaacaagtggacctagcgatgaaacagtaccgccaagatttggcggcctatcatgccttaggcaaggagaaagccaagatggagatgccccagatgcctaaaaacagtatgtttatcatctccggcaacaataccgggacgggtatcttgcaaaatatcatcgattcggacggaaccggtatcattttcgagaccgaggcggataccatcaccaccgctatcgggggtgattacgggcattggagcgatacgctccgtaacgctttcgaccatgccgggctctcgttcaaccgacggaccgataacgaataccgggaatgcgactccaccttcctctcgatggtactctcgggtactcccggacaggtagcaccgcttatcccctcgggcgagaacgggctcttcagccgtgaggtcttctactacaaatcgcagatccgggaatggatcgaccaattctccgtcgacgaggtagacgccgagaaggaattccaccggatgggctacgagtggaaggccacgatcgatcagctcaagtgccggggtaccattaccttgcgcctcgacgagcggcaacaagccgctttcaacgacagcttcgtacgtctcttcctccgtgcccggcaatccaacgggcaggagatgaacagttccgtggtacgcctcgccatcaacctcgtacgtttcatggaggtggtagccatgcttcgtgccttggaacaaccggaattactgctgccggcccaaggcatcaacagcgacaacctaaaggacaagatcatcggaggctgggaactccatatcaccgacgatgacttcgccgcccttctgacaatggcagagccgctctacctccacgccacccatatcctctcattcctgcctaccggcgagatcaccagccgaggcctctcggaaaaggacagtctgctcagctccatgccggacgagttcaccaccgtccaatggatggaggccgccgagcatgccaacatccccaagaacaccgccaagacatggctacgccgactatgcgactccggagccctcctgcatggcgagcataaagggatttacttgaaacccttataatgtacgtacgtgtgtgtgaggaaagagggttcatgaaaccttgaaacttgaaactctcctatagtcattttaaaattcaatacagatgaaaaaaatagatctcgcccgtcaatattgcctgacaggcaccccttcgaacgctttgcataagttgaaccgatatatccgtgacgtgaaaggactgaaagaggcccttatccgtcatggttatcattcgaaagaccgctccatcacgccgaagcaagtacagatattctatgattttttaggggaaccctaaaattcttctcctagagcgaataggtggaaacaaatggtatatccgggctttccgcctatcgtatctttgctacagaaacaaaaacatcaaccttgtctcctatgcgctactttaattatcaagagtttgaagactccgccacggcccggcgagacgggatcgacaacagcctcaccccagtggcccggaggatggtcacgatccttgtggaaatgctactagacccgctacggcgggtctggggcagacccatcgtcatcagtagcggctatcgctgccccgaattgaacatccttatcgggggagccaagcacagtcaccatctcctcggttgcgccgccgacctgatagccggctctccagatgatcatcgcctcttgttccgactgatacaagagacgcacgagctgtgcggactcgagttcactcagctcattctagagcccggcgcccgatggatccatatctcttacgtacccggcaaccttcgctgtcaggttatcgataaagaaaagtcgcctaattgacttaagtctttcaaaccgaagacttaaatcaaggagcacgaagagccaagtcatcaagcgtgaggactcaactcatcatcccccaagtcccttatgtatcacttaaaatatcttacgattatgtcattaaactattccattgccatgatgggcaacccgttgaaaaaagaggaacccaagaaagcctacgccaaggcgcaaaccaacggcgagctcagtctaaaagagctatctaccctgatagcgagtaaatgtacggtgcaccaagccgacgtttcggccgtgctcatcgccaccaccgagtgcatgctggaaggtctgaaagccggtaagcaggtggatttcggcgatctgggtgccttccgcctccagatcaattccgggggagcgccaagtgccgacctgttcacctccgactatatcaagggggtgaacattcagttcgtccccggcgaggaacttcaagtcatcttccaaggcctcaagttcaacctcgtccccacccgggccgcccaagccgccgtcatcaaggcccagaaggccggtaagacaacggtggatatctccggtaagaacggctcctcggacagcgagagcccggatgagatataatggggcacgtttcggcgtgctcattgatacagacttcgtattatcaaccttataaaacaaatttaaatgagtgaaaagaagaaaaccaacgtttggagcgtaatcatcaaagtagtcatcgccatagccaccaccatcgccggggccttaggcatcagtgcttgcgctttctagcgccttatccaagacctcgtacttagagtgccggcttttgaactcggggacgatcgccttcatcttgcccacgatggccatatcgtccctcgagcggcctaggccgacgagttcatctatatcttggcaaaccgtatcataatcgtactcccgtaccttggcgatcttgatcttcggatggaaggtaggcagcgtgatctcctcgtcgttcagtacctcctcgtacagcttctcgccggcacgaagacccgtaaaccggacctctacgttcttggcgcccgaaagctgaatcatacgtttcgccaagtcgatgatacgcacgggcttgcccatgtcgaagacgaagatctccccaccattacccatcgtacccgcctccaataccaaccggcaggcctccgggatcagcatgaagaaacggatgatatccggatgcgtcactgtcacgggaccgcccttggcaatctgttcacggaacaacgggatcacggagccgttagaacccagcacgttgccgaagcgggtcgtaacgaactgcgtcacgccttccacatggccctccttgatcgccttgtcgaggctctgcacgtaaatctcgcagatgcgcttcgagcaacccatcacattcgtaggattcaccgccttgtccgtggagatcatcacgaacttcctcgtgccatacttcacggccaagtcggcgatcacacgggtaccgtccacgttgttacccacactctcgcaaggattatcctccatcatcggaacgtgcttataggccgccgcatggaatacataggcggggcgatgctccgagaagatctcctccatgcgagacttgttagcgatgtccgccaccaaggtataggcgttgatatcccgccaatccctcgccatcatcaagcggatgtcgtgcaagggagtctccgcttgatctaccaagatcaaacgatccggagcgaatgaggcgatctggcgcaccatctcgccaccaatgctgccggcggctcccgttatcaggatgcgttgaccacgaagcaagcggcccaccgcctccatgtctatctctatcttttcccggggaagcagatcctcgatctcaaccttccggagttgtgtatgcgtcaaatcgctcctgccatcccattcttgcgccgccggggtcacgtagatcttgatccccgcctccgccaaacgggccaccatatccggctgttcccggatggagtcgctcttcaagggggagacgaaaaggatcgtcgcccgctcccggcgcatggcatcaatcagctcctcatcgaaaggatacacacgcactcccatcaatatacgattctgcatgttcccggcctccgagacgaagcctgccaacacgtactgtgcgggatcttggttctggatgctcttcgccaaactgataccgccctgcttcacgccgaagataaaggcacgctcagccttcgactgacggaaggttgtcacgtagaaatacttcacgaacacacgcatcgcccacatcaagctcatcgccagcagggaggatagcacaaggtctcgtttacggatatacaccaagtaaggcgaaaaatccgtaaactcttggaaggtcaccacgcaaaccacaccaaacagcacggcgaagcccacccgttgcaaatccacgaaggaagagtaacgaatgatgcccgaatacgtacggaacagcctaaagcccaccagataaggcactaggcaaacaccccacgtgagcgacaggtgccaaaagatgtccatcgtggcgaagatcccgttattcaaggcatataccagcaagcctgaaaacaggatcaccaagcaatccagcaggataatactccaatacggcaacgctttccttgagaaataccacgttgagagtttagaaaaaaggttcatcatgaataaaatttttggttcatgtcagctggggcaagccctccacctcaccggcatgccatcttcggtagtcggtcgaagaggattcgggagcagttagtaccacgtaatccgtctcgtcccaccgcaagatatgtttacgggcgtaggaacgcagcgagcgatccgtaacggagaccatcacgattgggaacgggtaggcgaacaggcgcagcggtgtggtctcgctatccgggaacgcacgatgcagctggtaggccgaacgctcgaaagccacccaataaggtcctgtacaatataagtggatcgaggtatggttcatgcgctcacgctccatgatctcgttcaggtgttcgtttagcaatgcgaccaagcgaataccggagggaagggaagacatttctttttgaattatgaattgtaaattatgaattttgaattattcattatgtttcagccaccggtcgtaatcagccaaccgacggatcaaagataatttactcttcttcggggaggattcccggctccacggatcgatcaactcgtgcgcacgataataatagatactgctatccgtacagccataaagcgtaagtagtaataatgccaacgactgctccgcacggatcaaggataagaacgagacgatcgttccgatcaacgacttttgccgctcctcgtcccctaatatcgtataggcaggcaacaagagggaatagagcttgcaacgcatcacggccgaatccaactgcaactccccataggtacgcaaggtctcggccgccagctcacgatcggcagccgtaacgccacaacttccccaatgacgccctagtgcctcatgaagaccattttgtatccgggaattgtccaaacgggtatatacatgcttgccttcctcggccaagctgatcacctcatattcgcccggctgaacacgcaacaggggaacccacatccagttgtccacgcataccattacctcccgctcgccaacaccgggctgtattactacacttgcctcaacacctttgaaacgaccatccgtgatgcgtatccggtcacctttacgcaaataacccgcttccggcacatacaccggaagctcatccgagtaagaacgggccacccaacgcaagttttccatctcacgatcggatacaaaaggatatgagccacggccatccacgctaggcaggaaattatacaagggaaaatctcgtttcaaacggaagatctcatatacagaagagcggataaacacataattgtagagcaacggacggtgagtctccaccaaatgcccttcacggcggcgcatctccacgaaagagggggcgaagaaatcgaacgtaggctcacccaaacgcactctgcgatccaactccttcttcaaacccttagcagggcctttatgacaagcgggaagagataacacataccatcttacggcgtggacatcacgcgatggtaaaggaggaagatcatgacccataggtaattcaatgccatatcagagcatcatattaacacactgataatctaacacttaaatcaaaaattcttttctattcccgaaaatttaaaagcaatataaaccatgtcaatatctcttctatcgggacgtgaaagagtggctacttgggaagtagcgtaaaaagtgagaaaatcattattaccctgctgtagagacggagtgtgctccgtctcccaccgtcaggtagtaatttaaaatacctatttgaggggatgagacggggcacgccccgtctctacacgatagttcgtacgatttttgggtgacgtgatgatgtagggaatatgaggtcgtttcgtctccattgtcgtgtccgtacaccacgcatagaaacgaaaaatagaggaaagacaaattcggaaaacaaacaaagcctacacaaagcctaaaaattgtttgttattcggtgttttttattaaatttgcggcgtggaagattacgctacttcccaagtagcctatcgcctaccccacctttgatacctcattatatatactctcgaagcaagccttgttcaccgcagacatcctatccaacgagaagcttttcaaatagatttgcgtggtcttgatcgattggtgtcccagcaattcgctgatcatctcgatcggtacaccctgttccttcaaggtcgtagcgaaagagtgacggatcgaatacgaggtaactatttccgtcacaccacaggcatttgccagctccttcagggacctgttaaaatcagccaaggcagaggtatattcccggaaggcctcttcacccgttttcgtcccgctcaagaaagtgaatagataaggagaatcccgaagcgtgtcggtcatcagcgcagccaacaactccctggccacaggctgtatctcgaccaacatcggcgtacccgtcttctggcgattatacctcaagaccccattccggatatcactctttttcaaatgagcgaaatcgacaaacgccataccgcaaaacaagaacatcaaacacaatgcccgctgtgttttgcgcaactccggagcagccagcggagcggtcatcaacaaacgcaaggactccgcaggcaacgccttcttctgtttgcttttcactcccaggaaaatccccttgaacaaataacgggaaaaaggagcctccccattctccatcgccaatccatacacacggcgaatcctacgcatataggtagataccgtattccacgagcattcccggtcccgcaaataatcttgatatctcaaaagcatttcccggtcaatacgggtataaaggatcatctcctgcccacaaaaacgcaggaatgaattcaaggcatcctgataactcttggcggacgaatagcgcccttgctctctcaatcgggctatatacatccgcataccctccgctaaatcatactgtttcataatattcacgtataaaaaaagtaaattacaacaaaaaacacggttaattcgtgattgtctacttacatttgcagaaaaataaataccatggacaagatcgtagaaatagcccggttcacctatccggcggatgcccaaccgctgatggccctgttgaggtcggaagggatagaatgttatctccgtaacgagctaagcagccagatcatggccggttacgtagacgtaggcggtgcacgggtggagattctggaaagcgatgttccccgggccatgaagatcatggaggaaggcggttacgacctgccccgggaagacgagcaagcggaaccggtagagaaagtcgccggattcgcacgtcatatcccttttctacgaaaatatcccttagagaaacaaatcatgatcctattcgtcatcgtagctgtctttttggctttggtgatttatttcggatcgcttatttcctcaaactaaacaaatgtaatcaatggcacgcagaaagataacaaatagtcaagccgtatgtatcaccttactatggggtgtcttatgctacatgctgcttgtatacagtgaaacgatcaatttcgacgtcatatttgcccttgtagcctccgctatcattgtgttcgttccgatctataagaatttcaaacatagaaacgaataacatttcgtcgttttttcaaacataatatatctaaatgatattttttacgcattttatctttcaattatttgctagtttcaaaaattagcttacctttgccacgtcgttaaacaaacggcgtacggataacaaaatggtataacattctaaatataaaattcagtcatgaaggcaagtgaagttttagacaacttgaaaagaagatttccgaacgaaccggaatatcatcaagcagtatcagaggttttagggactatcgaggaagcttacaacgagcatccggaatttgagaaaagcaacttgatcgagcgcctttgtatccccgatcgcattttctctttccgtgtaacttggatggacgataagggacaaatccagacgaacatgggttaccgtatccagcacaacaacgctatcggcccgtacaaaggcggtatccgtttccacgcttccgtaaaccaatcgatccttaagttcttggcttttgagcaaacgtttaaaaattcactgactacattgccgatgggtggtggtaaaggaggttccgactttagcccgagaggaaagtcaaacgctgagatcatgcgtttctgccaagccttcatccttgagttatggcaccatatcggtccggacacggatgttcccgccggcgatatcggtgtaggcggacgtgaggtggcttatatgtatggaatgtacaagaaattggctcgtgagaatacgggcacattcacgggtaagggtatcgagttcggaggttccttgatccgtccggaagctacaggttacggaaacgtatatttcttgttgcagatgctgaaaacccgcaacattgatatcaaagacaaggtagtttgtgtatcaggttccggaaacgtggctcaatatacggtagagaaattaatcagtcttggagcgaaagttgtcacgatgtctgattccgacggttatatatatgatccggatggtatcgaccgtgagaaactggattatatcatggagttgaagaacttgtatcgtggccgtatccgtgaatacgcagagcaatacggatgcaaatatgtacaaggcgctcgtccttggggagagaaatgtgacatcgctatgccgagcgcaacccagaatgagttgaacggcgacgatgccaagactttattggctaacggttgcttcgccgtatccgagggtgctaacatgccttctacaccagaagctatcgacgcattccttgaggccaagatcctttacgctccgggtaaggccgctaacgcaggtggtgtatccgtttccggtcttgagatgactcagaacgcacagaagttaagctggagcagcgaggaagtagaccagaaacttcagagcatcatggaaaacatccacgagcaatgcgtaaaatacggaaagcaagaggatggttacgtaaactacgtgaaaggcgccaacgtagccggcttcatgaaggtagctaaggctatgatggcacaaggaatactctaggtaattgagaattgaaaattagttagagagaagcgattgatgatcatataagcgaggggaataggctttgagaggctattcccctttcttatttccgacgaagtcccaattttcaattttcaattcttaattttcaattaaaaagcggtatcttagtgccgtaaatcgataagtatgataacagaagaacttaggaagctataccaatcatataccggatcaccggcagaggaaataacggagttaccgtcatccggctctaaccgccggtatttcaggataaaaggtcctgagacgttgattggagttagtggcacttctattgaggagaacgaggcttttatctatatggcaaaacatttccgggggaagggcttacccgtaccgcaagtatatgccagctcggacgaccattcattttatatccaagaagatttaggagatacgcttcttttcaacgccatcgagaaaggccgtaaaagcagtgtattcgacgaggaggaacgccgtttattacacaagacgatcaccaaactccccgacatccagttcttggggtccgacggtttcgatttctcgtattgccatccgcaagccgagttcaaccaacggtctatcctttgggacttgaattatttcaagtactgtttcctaaaggctaccgggatggagtttcaggaaaatcgtctggaggatgatttcttgaagatgagcgacgtattgttacgcagttcctccgccacgttcctataccgtgatttccagtcacgcaatgttatggtaaaggacggagagccttggttcattgattttcaaggtggacgaaaaggcccggtttattacgacgtggcttccttcctttggcaggcgaaagcgaaatatccggaggatctgaggaatgaattactatcggattatatcacggccctacgtaaatatatcccggtagacgaggcttacttccatagccagctgcgccatttcgtcctgtttaggaccttgcaggtattgggggcttatggtttccgggggtatttcgagaaaaagcctcatttcatccaaagcgtcccgttcgcgatcgagaacctgcggcagttattgaagaatgactatccggaatatccctatttatgctccgtccttcgtgagcttaccgggttgaaacaattcacggatgatatccagaaacatatgctggaagtaaaggtcatgagcttcgcctataaaaaaggaatcccgaacgaccctagcgggaacggaggtggattcgtattcgattgccgtgcgataaataaccccggtaaatacgagcgttacaaccatttcaccggtttggatgagccagtgatccagttcttggaggatgacggggagatcacgaatttcctcgagcatgtctaccatatcgtagacgcctcggtaaaacgatatatggatcgtggattcaccaatttgatgatttgtttcggatgtacgggaggacagcaccgttcggtctattccgcacaacatctggcgaaacatcttaacaccaagttcggagtaaaagtacatttagtacatagagaacaaaatatagaacaactctttaaccctacattatgaaagctatgattttcgcggccggtactggttccagactgaagccgttaaccgatcacacgccaaaagcgcttatacctatcgggggcaaaccgatgctagaacacgtcatactgaaactgaaatcctccggtttcgaccagatcgtgatcaatatccaccatttaggcaaccagatcgtggattttctggaggcgaacaacaacttcggtgtccggatcgaaatctcggacgagagcgattatctgctggacacgggaggaggaatcaagaaggccacttctcttttatgcgggaacgagcctttcttgatacataatgtcgatatcttatcgaacgtggatctcaagaaactatacgatacccatgtacaaacgaacccgttggctaccttactcgtcagccagcgcaatacctcacgttatctattatttaataaggagaatagactgtgtggttggcgtaatcatgagaccggcgaggtaaaatcttactatccctattttgacccggatcaacacaacgagtacgcctttagcggaatccacgtactctcgcccaagatattggagctgatggaagaatggaccggaaagttctctatcattaacttctatctggctatttgcgccaaaaccgatatcagggcttatatggcggataacctaaaactattggatatcggcaagccggaaaccttggccgccgccgaggaatggctacgacaaaacatctaacaaaatatttcacacatgaaaaaaactagttttatctacttactcttgttgatcgcactgggcctcagctcttgccagcaagagaagactttcaaggttcttcaattcaacatctggcaggaaggcgctgtcgtaaaaggaggctttgacgctatcgctgacgagatcgtaagaagtaacgccgatttcgttacgttaagcgaggtacgtaattatcatcagacccgtttttgcgaccggatcgtggaagcgttgcagcaaagaggacaaacgtactattctttctacaccgaggattccggcctgttaagccgctacccgatcacggatagcacgaccgtctatcccttgaacgatgacaggggtagtatgtacaaggccattacccacatcggcgataccgaggtagctctttacaccgcccatctggattatcgcaattgcgcttattacgatgcccgtggatacgacggaaatacatgggacgaggaacctcctgtcaccaatctggacacactcctatggttgaacgagcaatctgtccgtgacgacgctatcgcttgcttcctaaaagaggcgaaaaaggatcgggaagccggacggatcgttatcctcggaggggactttaacgagccttcccatctggactggaccgaggcgaccaaagatatgagagaccaccaaggattggttgttccttggcacgtatccgtcatgctggagaaagacggcttcaaagatacgtaccgtgagatcttcccgaaccctgtaactcatccgggacttacctgcccggcggactgtaaggatatcgctttagagaaattggtttggtcgccgaaagcggacgatagagatcgcatcgatttcatccattacgctccattcgagggattaacgcttacagatgtatgtatcatcggtccgaaaggtgacatcctccgtgggcaaagagagacggaagagacctccgacccgatcatgactccccttggaatctggcctaccgaccacaaagcggttcttgccactttccacttgaaataaaaaatggattcgcgagacccgtcttaccggctcgtctcgcaaatccacaaacaactatcttctcttgaaacgctatctttttatggtttcaataccacgccaagacttttcttcccatccatcttaatcgtaatcggagcatcaaaatgtacatgacgaagatattccgtctcctctacggcgggttgcgcattcaagaacgcctcatcgaaccaaccatctcccttaaatggattaaccgtaaaatagcccactccgaacgaagtcaggttctggaagaaatgggtaccttgactcgggtctacccgatagttctccaatccgcattccacaatcacccgtgcgttactgatatgcggccatttcaccggaatacccaaccaagagtcgctgctcccccatcgaccggggccgactaatacgtatcctttctcctgatcggtaaacgaacggttcatcttctcgatctcataagcgatcaactgattattggatgaattaaaagcgcccgtcttcacatagataatatcctgtacgtcgccaacgatgccatgccccaaaacactggtagaagaaaggatggtttcctcgttcttcaccaagctcagatcctcgtccataatctctttattatctacgatcggacggatttgcaacagatagaaagtcgcccttgtatgatccgacggggccatgttgacagcgaactcaatctctaccggacggcccatttcctgctgcccgatccgtaagatctgatccaacgtatccgccagcgggaacacgtcatgctgtaggatattcacgaaagaaaggatcttacgaccgcccggataataaccgtcacggataatctgatcgtacggatcgtatgtagagacaatatatttcaaggaaccctcagcgtcagcgtccttcaagcccagcttcaccaagttaaaggcatcatctaccgagaaggcttccgccatattcttcaaatccaaggcatagaaacgagtctgcgtttccctaagagcgaaatccatcgtactcatctgcaagatgctatggggatgtcggggagagaaacgcaaggtttgcccgccatcgacgatatacttacccaatcccaaggcgatattcgcgatcccatcttccgccttctcgttaccgatcggatagaaattcaaggaacgggccacgcccgacatcgtcggatagaaatgatcattataacgggagcccaccacttcttgcaagacgatagccatcttctcctgatcgatcaagttcgaggtagccgtcatatacgccttactgtccttataaaagacagaggcatacaccgccttgatagcgtcgctcaccgtacggagcatatcgtatttctcctcgatcttaggtaccatatacgtagaatagatcccggcgaaaggttgataatgcgaatcttccagcaggctggaggaacgcacggcgatcgggcttttcaccacatcgaagaaagccatcaagtcctcgattaaacgggagggcaagctggcccgcaagaaataccggaggatcgtctcgtcgtccgcatcgcccagcgctaccggatacaactcgttcgtctccatgaactcgtcgaagatgtcggtacagatcacgaccgtcttcgggatattcacggcaaaattatcactctccagcttagggtatcgcttcaccatcgcaccgataaaggcaagacctctacccttacctcccagcgaaccgtcgccgatacgggcaaaattactatactcatcaaaacgatccttctgataaaccgccacgacacccgtgttcttcatccggcgatattgcacgatcaagtcgaaaatcaatttccgggcctcatccatatccttatagtcactcacgtccacatgcttcaaaacctcggcgggcggaaacatggcacgggaataaaagaaacgggagaaatgattccgggagagatggtaaaccagcgagtcgtcgggaatctgaaagactttcttttgaaggtctttcaaatccttgatgcgcatgatctcctctttcgtatgcggattcaagatcacgaaatcgccaaaaccgaaacgctgcatgatcttctttttcaaatcctgcggataactcttggagttcttatcgataaacgaggcgttcagttccttcgcgtacacatggttgctggcctccgaagattccagcacgaaaggaatgatcaaacccgttttccgtacatactgtccaaacttataaccggcatacggatctttcacgccattgtgcataaaactcatatccgagataatacccaacatattatctcgatactgatcaaagatacgtaccgcctcctcgtaattccgggccaatttgatcttcggacggccacgcatacgcaacgtacgctggtgatcgttcaacgcctccttcgcgaacatctggctttgctccagcacgaacttatataaatgaggcaaagcggacgaataaaaacgaatggaatcctccaccaacaagatgatctgtacgcccacgctggccgtatcgtccggagcgttcatcttatcctcgatcaacttgataatcgccagtaacaactccgagttacccaaccagctgaacacataatcgatagcgctcagatcctcgttggcgatccgcttagacacctctttcgagaaaggagtcaatacgacgatcgggatattcggataatgcacctttatctcgctcgccgcagcgaatatatcccggttatccatattcggcatgcaaatgatcaattcgaagttccggttcttcaactcattcaaagcctcctcctcggtagtcacctgcgtaaaccggggtgggtaacggaggcttaaggaagtatattcgttaaatatctgctcatctacacgcccgtcatcttccagcatgaaggaatcatatttcgtagcgataagcaatacattatatatacgcttattcattagattggcaaacggggtgtctctgaacaccaagtcttttaagttcggtataccgctcataatagattctgatagaattattcgagtcaaatgtaaggaaaaataataactattgaaacatgaaagtacgcattctgactctaactgaagatttttaggttttcactgataaaaagtaagcgaaactcttggtcattccaaagaattacctacatttgccaacagaatgttatccttttaaagaatataaatgctatgaagactgaagttattttatcagcgctagaggcaaaacatccgggagaaaaggagtatttgcaagcagtaaaagaagtgcttttatcaattgaggaagtgtacaaccaacatccggaatttgagaaagcgaaaatcattgaacgcctagttgagccggaacgtattttcactttccgtgtgccttgggtagatgataaaggtgagatacaagttaacttgggataccgtgttcagttcaacaacgcaatcggcccgtacaagggaggtatccgtttccacccgtccgttaacttgtctatcttgaaattcttaggattcgagcaaacatttaaaaacgctttgacaacccttccgatgggtggtggcaaaggcggttccgatttcgctccgagaggaaagagcgatgccgagatcatgcgtttctgccaagcgtttattcttgaattatggcgtaatcttggtccggacagggatgttccggctggcgatataggcgtaggtggccgtgaggttggttatatgtacggtatgtacaagaaattggctcgcgagaacacaggtacgttcacgggtaagggcatggagttcggaggttctatccttcgtccggaagctaccggcttcggcgctctttacttcgtacatcaaatgttggagactcacggaatcgatatcaaggacaagacggtcgccatctccggtttcggcaacgtggcttggggtgccgctacaaaggcaaccgagttgggcgctaaagtggttactatctctggtcctgacggatatatctatgatccggcgggtatctccggcgagaagatcgactatatgttggaattgcgtaattccggaaatgatatcgtagctccttacgcagacgaattcccgggctctaccttctatcccggcaagaaaccttgggaacaaaaagtagatatagcgttgccatgcgctacccagaatgagttgaacgaggctgacgctcgtaagttgatcgagaacaagactttgtgcgtagctgaggtttctaacatgggttgtacggctgaggctgtagacttgttcatcgagcataagcaattattcgctccgggtaaggctgtcaacgccggtggtgtggctacttccggattggagatgacccagaacgctatgcatatctcatggaccgccgccgaggtagacgctaaattacatcagatcatgagcgcaatccacgaacaatgcgtagctcacggtaaagatggcgaatatatcaattatgtaaaaggcgcaaatatcgcaggcttcatgaaagtagcgaaagctatgatggcgcaaggtatcgtataagaataaggtcagtttaggctaaataaaaacatagttatgaattctttgaaccttagttatggtttgagaatttcataactatgttttttaagctcatatcagcggactttcccggggttcttagcgataaaatccttccatcccgtatacttcttttccgagatcggattattggtttggaaataatgacaaacagccgccgccaacccatccgtagcgtccaattgcggaagcatagactcatccggtatcttcagatagcgttgtagcatgccggccacttgttctttcgccgcatttccattccccgtgatcgagagcttgatttttagaggggcgtactcgaagatcgggacatcccgctctaaagccgccgccatcgctactccttgtgcccttccgagtttcaacatactctgtacgttcttcccgaagaaaggcgcctcgatagccaactcatccggatggtattgatcgatcaaggccaagacccgttcgaatatcttacgcagacggagataatgatcctcatatttattcaattgcaggattcccatagcttccagcttcggtttattcccctcgatcttcaagattccgtatcccatcacgatcgtaccggggtctatgcctaatataatacggtccttgatcatttaggtagctctatatcttccaacagggtagagaatccagcgatcttctctttataacgtcctatcaaatcttgctgcaaggctccgccttccttacgcacccactcattcaacgaatcgatatccctcgtatgaaactgtacggaaaaactttcaccttcctcattccgcgaatccaagatccgtctcaaataaggactataaaggataccgctctcggaggctttcggtatataactattcttcaaatattccagacactcatccacgatatccttatggatatgaaaagtcgtattataaattatcatcttctttcctttctcttgaaatttcttatacaaagatagcgcatatatcaagaaaagccttatatttgcacatgaattaacaagacggggcattagctcatctggctagagcgacagactggcagtctgtaggtgatcggttcgagtccgatatgctccaccaataataaattaagcggttacaaaacaagtagccgctttttttattgataaaaatcgttttgttttggcgttttgttgcatttggtgacgcaaatttgacgcaaataataacgctgttgcgttcattgcatttccggtttaacacccagtttaaccttaccttccaaacctcgctagaaccgcagccttatcaaacaaaattaggcagttacctaaaaagataactgcctaattttgtgagccgaaagccggacttgaaccggcgacctacgcattacgaatgcgttgctctaccagctgagctatttcggcaacatttgtttctttatttcgggcgcaaagatacagggtttatttgacatctgcaagaagattcgctaaaaaatcatctaaatctgcatctaaatcttttaatagaggatcgtccagacgaagcatatcatcatcgatgaagagaagttcctctattacaacaaaatcctcatcggtcaagctaacagaaagaggcttcatgaatcgggggacgtcaaaaatattcttggtagacaagatcgtaagaaccgccttcaccgaagcggcaacccgcttattgaatgcgttctcctcctcgttcgagttcacccaatcgaagataacgatcttttcgatcaaatgctcctcatcatcataaatttgcagttccccgctttccgcatcagcctgcacatataagtcgcttataaaattaccggactcatccttggccagcttttcaacagccgacgtaaaagcgttctcgatgagggattgaacctttgccatatttgcgttcatatattaattctcctttattcgaatatgcgtcaaaagtaataataattcaccgaataacgccgttaatcctcaccaaattgcacatttagtttcttatcggaacgaattcgttcggccaacgcctgtacatagagttccaataatttggtactcttatcattatcaccattattacgcttgaataaatcgtatgatttatgagcccactcataggcttcttttaaagctcctctcatctcatggcatagggccagattagaggccgccttcgcccggcttttccagttttccgtaccccggtaaagcccggaccaacgatcttccgccatatcccatttctcattagccgcataagcggaagcctctttccaacgtgaacccattccggtaaagtaccaacgagtctccttctcccaatgaggaacaaaattagcgtagaccttcgccccgaaatatttaccggccccacgcaaagcattctccggagagggcaataccttatccaagatcggcatataatccgcactttccgcccaataaatactatctttcatatgtaccgtcgccagtggagcctcacgatcgggaacgtaactgcgtatcacgccagccatctgcacgtcgatcattcccattacatacccttcgcccaaggtacctacgcttttcttcatatcgaacagcaagcggtcgatggagataaccgcatcggcaccggtctcatcgcatagcgacgctacttgcccttgggtaagtttcgtatccagaaacgcctgattatcttttcgaaccgcatcatggtaaagcaatacgtcgttaaaataagaagcctccacgatagcctcccctaaagtacggcaagcgtcaaacagcgcactatccgctttcgctttgcaagtatcttgcctctctccctgcaaggtgtattcgtaacccgcatcctccggttgggggacggcattgtttacgataagtaccttggcgacattctcaggaaacgtcacctccgcaggattatacgtctcgatacctacataattaatcgtgctacaagcggacaacaaacccgctatgcctataaaaagaatgcttctcatcttcatctatttaaaagggggcgatttacgcccccacattatgtcaaatcactcacagccttgaaatagccgatagactccgcgatccccaagaaggggtctttcatgtctttctcgtattccaagctacacattcccgtgtaattaacttcccgcatcatacggatcagcgcagggaagtcgatctttccacgaccgatctcgatcccgactcccgccttcgaagaatccgtcacgtccttgatgtgcatatcgaatacccgggtatggtatttcttcaagtcggcgacaggatcacagccgtttcgcaagtcatgcccgacatccagacacataccgatacgggggtctaaatccttcgtatgctcccaaacgtccgtagcatcgggatacgtcttaatatcaggaccgtgcaagtggatagcgtaatgaaaatcatactccttcacttttttatccacatagggtaaaagctcgtaattcgggacaccgacgattaacttcactcctacccgcttcgcataatcaaacgcacgatctatctcttcctcactcttcatataaataggacctacggcatatcccgtcactttatgggcagcgcatttatcatgaaaagccctaatctgctcatccgtactattcaacggcaaatggaaatccttgatgcaaagataatggatatctaatcgttccaacgtcttcaacgtcgtatctaaatcaaaattaacgaaagtatatcccgccattcccagatggaacgggtttacggccttcggggcttttggctttacagggtccggcaaagcggcccgggcgatcgtggaggtacctaataaaagggcacccgccaatccttgtttaaaaaatgtacgtcttgagtgtttcatggtctattacaatattatatataatgtatactgtttatcttgggaaaataacgctaaaggtagagcctaccccttgctgggaagtcacttctatacgaccgccgagctttgtgaccaaagccttggagatagccaatcccaagccgactccattggtccattgcgtcaacttgacaaaacgatcgaaaacccgttccaattggtcgtccgggattccctcgcctgtatccgtcacataaaagcggatttcctgctccgtcacgtcatacccgaagcaaatataaccttttttcgtgtgcttgatagcattcgtcaataaattagtgaggacttgcgttaatctactccgatcggtataaagcgtaaaaggttggcaatcatccaatcgaagttctacattttcgggcatacgtaataaaatgatactatagatatctttcattaaagccttcatttcatgattcgccaaaacgaaagtcaacgtattcgactcgattttcgatatatccaatacgtcttctatcaagcgttgcaacaattcattattactttgtataatattggagagttcatgacgagtttccgcatcttcctcatcggcgatcacctgcgagaatccgacgatggcgttcaatggcgtcctgatctcatgattcatgtttgccaagaacgcagatttcaggtgatccgcctcctccgctttctcttttgcgatctttaatcgtatccccgcacgatgacgggcataggcgactatacccaagcccgcacatagtaacaacaccaagacaaatcctcctcgaagcatcaagatacggacacgcgacttttccgcctctagctccagtttcttactttgtatctctagtttttccacctctcgttgggttttcaacttcgctaaatcctcgtaatattttacccgcataatcgagtcgtgcacttctttagaatctctgtaagccctagccgcttccatccctcttccaagcttataatagagatccgccttaaaatcctccactgagacccaatcactaaagcgtttcttatccaagagcattagttccaatttgttcgccaaatcaatggccttctcatatttccccgctaaagcgtaataattcatccaaaggaattgaggcaggatttgctcggcattcatattattcttcttttcgatatcctccatcatcctcaagtgctgataaaccaaggaaggctctttttccgccacgtaatactgggccgagtaataatgatagcgatcttttaaaaaagcgacagtatgttccgcatccaattgagtaatgtcctctttctcgcactcttgtatgcaagaatccaatttattcaaatactccaatcgcaaatccttcgtaagcaacagccgtaacacgtaataccaacgcatcctagaggcattacgttcttccatgcgagataagatctcccggcttaattgaataccctcctcatccaatcctatattaaaatagaaattcgctaaagcttggtttgccatatccaccccatccggataattaaaataggtcgcaagattcctcaagctatccacctcccggattaccaatccctgcatcccctcattcgctaaagaatagatattccatcctttcgccctacataattcctcgatccggtttgtcgcgatgaaaaggggttccgctattttcaaatatattcgcaagctatccggatcttgcatatagtaataacgcatcaagaatagtaaggcatttcctttgtaataatcgttacgttgcctctgtgcctcttctagtagcaaatccgcatatactttatatactttgttatgcgtattggcataaagtaattcgttcaagcgtattagtttactactatccggcaaaaccttgatttctcttcgtaagctatcgacaaacgtgtcacctttcgccctatccggaataagcaaagttagaatcaacgtccaacaaccaataaaaaacaatctcttcatatataccttgaaaagttagcacgactatccattattcaatgcccggcaagttaataaaaatttaaatgccaagacatcaacataaacaagtttaatatcacattttcaacttatacaacaaaaagcctatatcaaccaaaaaaagattgatataggctcttatttcaaagaaacggccgttctatttattttgtcaaggcagcgatactttcctcgatagacttaatcttcgattcggcatcggcttgctttttcttctccatctcgattactttcgccggggctttgctcacgaagttctcattgcctaatttcttcatgacagaagccaagaaacctttttggtatttcaattcttcttgaagcttagccaactcttcctccacattgatcagattgcctaaaggtacggcatattcagtcgtacggaccaagaacgatacagcaccggccgctttctcctctaccttggagatggaagagagattgcacatcttagcgattacggcgttgaacgcctcattgtgctcacccacgatctgcaattccagcgcatccttattcggtatattcttttgcaaacgaatggtacggacaccaccaacgatctctttcacgatctcgaaagcatccaaataagcgctatctacaaccgctatttccggcatttgggcaaccatcaagctctcaccttcctcgcgaggctcaagggcttgccataattcctcggtaataaacggcatgaaaggatgaagcaaacgaagcaaggcatcgaagaaacctaacgtagcctcataagtagccttgtcgatcggctgctgataccccggttttaccatctccagataccatgaggagaactcatcccagaacaatttatagacagccatcatcgcttcgctcagacgatatttactgaaagagtcgtctacctcggcaatcgtcttatccagctgcatcttgaaccatttcacggcgatagcggaagcctccggctgggcgatcgtatcgtctaccgtccagcccttcaccaagcggaaagcgttccagatcttattattgaagttacgcccttgctcgcacaaagcatcatcgaaaggaatatcatttccggcaggagccgcaagcatcaagcccatacgcacgccgtccgcaccgtattgctcgatcaattgcaacggatcgggagagtttcctaaagatttggacatcttacgtcccagcttatcacgaacgatacccgtaaagtagacgctcttgaacggcattttccctctgtactcatagccggccataatcatacgggctacccagaagaagatgatatccggtccggttaccaaatcactggtcggatagtaataattgatttcctcgttatccgggttattgataccgtcgaacagggagatcggccacaaccaagaggagaaccaagtatccaatacgtcctcgtcctgacgcaaatcagacatggtcagattcgggttaccacatttctctttcgccagttccaaagctttctcttccgtctcggctaccacgtaaccaccttccggcaagaagtaagccgggatacggtgtccccaccaaagctgacggctgatacaccagtccttgatattctccatccaatggcggtaggtgttcttgaacttcggcggatagaacttgatatcgtccttcatgaccggctccaaggcgatctgggctagatgttccatcttcaagaaccattgcatagacaatttcggttcgataggcacgttcgtacgctccgagaaacccaccttgttctcgtaagcctctaccttctccaaaagaccggcgttacgcaagtcttcctcgatctgcttgcggacatcgaaacgatccatgcccacatacaggccggcagcctcgctcaacgtaccgttatcgttaaatatatcgatagaaggcaaattatatttctcgcccagcatatagtcgtttacatcgtgtgccggggtcactttcaaacagcccgtaccaaactctatatccacgtaatcatcctcgatcaccggaatctcacggcctaccagcggaacgatcactttctttcctctcagatgttggttcttcgggtcgttcgggttgatacacatcgccgtatctcccataatcgtctccggacgggtagtagcgacaacagcgtatccctcctcgcctacgatcttatagcgaagatagtacagcttgctatgctcttccttatagataacctcctcatcggacagggccgtcagcgccttagggtcccaattcaccatacgcacgccccggtagatcaagcccttcttatatagatcgacaaaaaccttgatgacgctttccgaacgtttctcgtccatcgtgaacgccgtacgatcccaatcgcaggaagcccccaatttacgaagctgcttcaagatgataccgccatgctcttctttccattcccaagcgtgccgcaagaactcgtcgcgagtcagatcggttttcttgattccttgcccggccaaacgattcactaccttcgcctccgtagcgatcgaggcatggtccgtacccggtacccaacaagcgttcttacccatcatacgggcacggcgaaccaagatatcttggatcgtattgttaagcatatgtcccatgtgcaatacgccggtgacgttagggggcgggattacaatcgtatacggctcacggccgtctggctttgacttaaagaagccgttatccaaccaatactgataccacttcccctctacttcagcgggattgtacttactagcgatttccatatttttataactaattagtctttacacatttctcgatccgcgaaagtacaaaaaatatagacaaaaaacgctgagcatcgggaaatatagtcggccgagacaataggcattctctctcggatacgccactattctataaaccacgacatggtttgtacagaccaagtcgtggtttatacagatcacgacgtgatttataaagaccacgccgctattttgaaaatagagtgaatggcaattacttttacatccggggatttgaaggtttattcctataacaagcaaactatttataacggtttttctattccacgctattgcagtttcgcgtaaatgcctgtatcttcgcgtactataaaaaatagatatgagaaagcgatctgagtataaaggaggggataatcgacgtaaaccctctaaagaacgacaggtaacggtgggtgaaagtaacactttgctacctttcctgttcgagttattaaaagagcaaagccgttcatccgtgaaaggattattgagcaggggacagatctcggtaaacgggaaagtcacccggcagttcgatgccccgctgaaccctaacgatacggtcgggatcaactatggaagagggaaggtggaattcaacaatccgttacttagaattgtttgggaagatgatgacctcatcgtgatcaacaagcgggaaggtttgctatccgtatctaccgatcgtatcaaagagcgtacggcctaccgtatcctgagcgattacttgaaagaatgcgaccctcgcaacaagatattcgtcttgcaccgtctggaccgagacacatcgggtatcatgatgttcgccaagaaccagaaggtaaaagagcaactacagtccaactggagcgaggctatcacgcaacggacctacgtggccgtgatagagggacggccggagaaagacacggatttgatcgtatccaacctcgtggagaacaagcatatgcaagtgtacgtgacacaagatggtgacgggaaggaagcgatcacacgctaccgactcctgcaaacgaacaatcgttattcgctcgtggaactcgatctggagacgggacgcaagaaccaaatccgtgcgcagatgcaatccatcgggcatccgatagccggagactctaaatatggggcggagacaaatcctgccggacgcttgatgctccatgcccgcaggctctgtttcatccatccggtaacaggcgaggagatgcgcttcgagacacggatcccggagaaattcacatcgacagcaaagtaatctatcaataaaggacaaaaaatgaagaaactcatcagttcgatcatgctggcgctaatagcgctggtagcgcaggcgcaaatacttacgcctgtcaagtggaaaattaaactagacgacaagggcggcgcacccgagaaagagatcgtctttaccgccacggcggacaaaggttggcacctgtatgacatgaacctgccggaaggaggtcctgtttctacatctttcacattcgagacattgaatggagctgaactgatcggtcaaccggttccttcggtaaagccgaccacggtttacgacgagcaatttgccatgaatcttcgttggtatccgggtacggtatcgttcacccaaaaactaaaggttaccgatcccgctaaattcaaggcggagggcgaggtggaatttatggcttgtaatgacgagacttgtcttcccccggatcaaatacctttctctttcgataagaaaagtatccatgtagatccagctctggcagctaacagctcgactacagaggtggataaagaggacgccacggccatacagccggatacgcaagtcgtagcggaagaggccagcgagttgaacactccggaccctgccgctaaagagacaccggctacgacatctcctaaagcgtccgacagcttaaccgatagcccgaatctttggtctccggtgatcgaccaattgaaatcgttcggcgacgctacggtatcggcggcggatacctcttggttattcatcttcttcgcgggtttcttgggaggtttgatcgccttattgactccttgcgtttggccgatgatccctatgacggttagcttcttcctgaaacgtacgaaagatcgtaagaaagcgattcgcgacgctatcacctatgggttatctattatcgtaatctatttggtgatgggcttgttgatcaccggtatcttcggagcgagcgcattgaatgatttatcaacgaacgcgatctttaatatcctgttcttcttgctgttggtagtattcgcagtctccttcttcggagccttcgagctggtattacctgcgtcatggactagcaaattggatagcaaggccgattcgacgaccggcgtattgagtattttctttatgtcgtttacgttggtattggtatctttctcttgtacgggcccgattatcggaaccttgttggtacaggccgcttctatgggtacggcggtaggaccggctatcggtatgttcggtttcgccttggcgttatccatcccgttcagcgtcttcgccatcttcccgaatatgctgcaaagtatgccgaaatccggcggatggttgaattccgtgaaggtcgtattgggcttcttggagttggccttggccttgaagttcctttccgtagcggacttagcgtatggttggcgtttactagaccgtgaggcttttatcgtgctttggatcgtgatcttcagtttattgggtgtttacttattaggaaagatcaagtttagccatgatagcgaagtaaaatatgtatctgttcctcgtctgtttatggcgattatctctttcgctttcgccatttacatggttccgggactttggggcgctccgttaaaggcgatcagcgcattcgctcctccgttgtatacacaagatttcaatctatacaaaaacgaggtacacgccgcgttcgacgattatgaatccggtatggcttatgccaagaaggtaaataaacccgtcatgatcgacttctccggtttcggttgcgtaaactgccgtaagatggaggcttccgtttggacggatcctaaggtgaagcaaatgctagaaaatgattacgtgctaatcactctcatggtagacgataagacgaaactcccgcaacccatcgagatccaagagaacggaaagactcgtaagctgaagacgatcggtgataaatggagttatttgcaacgaagcaagttcggttctaatgcccagccattctacatcttattgaatgacgagggacagccgctcggaccttcatacgcattcaatgaggatgtttccaaatacatccagttccttcaaaacggattgaaagaattcaagaaagaacaacaataaaacaaacagagggccgggttctaccctgccctctttcttttacaatcattatagaataagtaaataatatggcaactagagaagagaagatggaagccttcgggcaattactcgacattctggatgaattacgggtaaaatgcccttgggatcgtaaacagacaaacgagagcctccgcacgaatacgatcgaggaaacctatgaactatgcgaggccttgatgcgtgaggataacacaaacataaaaaaagaattaggagacctgttattgcacatcgtcttttactccaagatcggcgaggaaaaagaagctttcgatatcaaggatgtctgcgacagcctttgccagaaactgatttaccgccatccacacgtattcggagatacctccgccgataccgctcaaaaggtagagcaaagctgggagcagcttaagttgaaagaaaaggggggtaacaaaaccgtactggagggtgttcccgcttccctcccatccgtagtaaaagcgcatcgtatccaagataaggcccgtaacgtaggtttcgactgggaacaacgtgatcaagtatgggataaggtacaggaggaatttaatgagttgaaaaccgagatagacaggatggacgcagataagatggaagctgagttcggagatctcttctttagcttgatcaacgctgcccgcctatacaaaataaatccggacaacgcattggaacgcacgaaccagaagtttatccgccgttttaattatctagaggagcacacgatccaagaaggtcgttccttgaaagatatgacattggaggaaatggatcaactgtggaatgaagccaaggccaaaggcttataaagcaaggataagggcaaaacaaaaggggaaccgacatcacgtcgccacccctcccttaacttaaacgccaaaactaaatctaaacaaaaaacacaaataatgataatattttactttttctgtttttcttcctttttattgtcccgaccactcttcatgaaattccggacaaacttatattccgcatttcggtacttatagaccttttcgggagaaagtatcttcttgaatctctcaaaatactctttttccaactgtgcctcttttatctcaacatccagacattcgtctatcactttgttataatcagcatctgtcggattctccttatgtcgaatttcttttgataacttacgacattcacgacctacctcaaattttttctgtcgcaactcattgcataaaggaataaattgtgcagcttcctcaggtgtaaggccaacttcagccgtaataaaagcattccgccttgcttcgaatgcctctctatcaaaatgtctttgctctttcttctcttgtgccgtagcattgaaagagagtagaaccgaaatcgctacaaatgtaatgaaaaatattttattcatacaagtattattacaaaaatcttcgataaaattactattttaaactttattcagaataggaaagttcctcatctaagagataattggcgtactgagcttccaaatactccaaatactcctcatcttcttccgcttcaatagcgtctaaagccgttgtcgggacttccgtccggaccagtaaagaatcagacgcagtactaccatcggaaccgtttattcccacgatagccttgaaaaacaaaccaagaccagcgaataccgcagccatgtacaaccacggacgaacacgatccatcaaggaaatccgtttcgccctctcctcctgcttctcggggagctgactcatgatccgctccgtaagcccttccatatacccttccggtacagtgaaaggattagttcctttcaagcgatctaggttgttttcttcttttttcatactttttctctttttatattgctttgacagcgattcgggcaaaaggtttaaacctcttttgttaaaaactcctcgatttttttcaccgcatgatgatacgaggccttcaaagccccgacagaggtacctagtatctcggacatctcctcgtacttcatctcctcgttatacttcatattgaaaaccaagcgttgtttctccggcaaggtaagaatagcgttttgcaatcttacctgtatctcgtcaccatcgaagtattcatcccctttcaaacgttccagcaaaaaggtatccgcatcgtcgatagatacgttattcatatttcgctgtttatttaggaaagtaatgcactcgttgatcgcaatcttataaagccatgtagataatttggcctcaccgcgaaaaagctcgatgttcgtccaagctttcaaaaatgtattttggagtaagtcgttcgcatcctcatgatccagtaccatctttcgtatatgccaatacaacttctcgccatacaagcttacgaccttggcaaaggcctcacgttgtcgggccgggtcccggagctgtactacaatttcgtcttctgtataggattgcattttttctattttgggaagtgcccagaacaggactcgaacctgcacgatcgcaaaaccactcgcacctgaaacgagcgcgtctaccaattccgccacctgggctttttttaatcattctgaagcgcaacctatcggtattgcgcatacaaaggtaatcgttttttccaattagcaagcaaatgaaaataaaaaaagcgaccgtcccttccggaacggccgcccatatcattaatcacgggagtcgattacatcataccacccattccgccgcccatacccggattcatcggaggcatagcaggagtctcttcttttttctcagcgatcacgcactcagtagtcaagaacatacctgcgatagaagcagcgttctccaatgctacgcgagttaccttagccgggtcgattacaccagcctcgcacaaattctcgaaacagtccttacgagcgttgtaaccgaagtcgcccttgccttccttcactttctgaacgataacggcaccttccttaccagcgttagctacgatctggcgaagcggctcctcgatagcgcgcttaacgatctcgatacctgtagtctcgtcctcgttgtcgcccttcatgccttccaatgcatcgatagcacggatataggctacaccaccaccgggcaccgtaccttcttcgatagcggcacgagttgcgtgcaatgcgtcatccacacggtctttcttctctttcatctcaacctcagaaggagcacctacgtaaagaacagctacaccgccggccatcttagccaaacgctcttgcaatttctctttatcgtaatcagatgtcgtgttctccatctggatcttgatctggccgatacgagcttggatagcctccttgtcaccagcaccatttacaatggtagtggtatctttgtctaccgtgatcttctcagcggtacctaacatatccattgtagcaccttccaatttcaaacctttctcctcagagataaccgtaccgcctgtcaatacagcgatatcttccaacatagccttacgacggtcgccgaagcccggagccttaacagcgcagatcttcaaggaaccacgcagacgattcactaccaatgtagccaaagcctcgctgtcgatatcctcagcgatgatcaaaagaggacgtccgctctgtacggtcggctcaaggataggaagaaggtcttttaatacggagatcttcttgtcatagatcaagatatacggattctccatctggcactccatcttctctgtatccgttacgaagtacggagagatataaccgcggtcgaactgcataccctcaactacgtcaactgtagtttcagtacctttagcttcctcaaccgtgataacaccttcagtcttcacacgttgcatagcctccgcgatcaacttaccgatagcctcgtcaccatttgcggagatcttcgctacatgctcgatcttctcgaacttatcacctacagcctcagcttggttagcgatgctctctacaaccttagcgacagccttgtcgataccacgtttcaaatccatcgggttcgctccggcagtaacgttctttaaaccgacaccaatgatagactgagccaaaaccgtagctgtagtcgtaccgtcaccggcgttatcgtttgtcttggaagccacttccttaactaattgagcacccatgttctcgaacgggcaagtcaactcaacttctttagcaaccgttacaccatctttcgtgatgtgaggagctccgaatttcttctcgataattacgttacgacctttcgggcctaatgttaccttaacagcattagccaactcatccacacctttcttcaaaaggtcgcgggcatccatatcgtatttaatctcttttgccatgattgtatctctttttaatattgttgtttataaaaatgaattagataatagctaaaacgtctgcttggcgcatgatcaagtatttctcaccgtctagttcgatttccgtacctgcatacttaccatacaatacgttatcaccaacctttacaaccatctcctcgtctttcgttccgttacctacggctacaatctcaccctttaaaggcttttcctttgctgagtcaggaataataattccacctaatgttttctcttccgcagcggccggcttaatcagcacgcggtctgctaatggtctaatgttcattttcttggtattttaaatgttaataatattacgtttttagtttatgaactttgtgttcacgcctaagtctatgcgaatagtgtgccaaacgtattcacccgagttcgactgacaatatttcggacgaaatagacaaatatccgaagagataactgacaacttgtctttttgcatctctcaaaaggattatcaatcgaccagcagcgtattcatggaatatgcttttacgatcggagtatagactcgatcgcctatgcggatggaaagggaacgatcatcactggtctcattggcgataatcaaggcgatactgttatccgggttacggaatgccagcagattcgtataggctccttccgtttctaatttatatgcaccgggctggacataatggctgacatgtttcatcacgtagtattccggagtatatcgatagctcttggtttgcggatctacgacaaccaatgagttttgcgcccatccccaacgactgatccctccattttccaaagatatattccaatacatataggcagaaacgccattatccagaaaatgtcgcatcaacccccaagaatacatggcacccttccaatcgttcttgccatctccacattcttgctcggtttggtaaagcttcaacccgggataacgtttgtggattccggcgatagctcccttacccgcccattggaaaccgacaccttttacatatttaccactagcgggatctgtcaataccgtatcaacaagcgactcattcgcacgttccatcgtgccgaacataatatccactccttgaacctgcatggccggcccgagataattaccgataaaattagccaaagaagccgatgtccaacaacaactcgggaatatttgcgcagagttgaactcgttctggggcattatggcaaagattggaattccgtgtttcttataggcctcgataaatttagagaaatagagggcataggctttcaggtaaagagagtcttggataaacatatccgtaccttcatggccgaccttatcggccgacaaaccatttcgatacttctcgtcataattctcacccgtataggcagaggcatagtgtttgttatatttcatccaagcgggagggcaccacggggaagcccacaagcgtaagtctggctgatacttccgagcgttcttgataaaaggaatcaacgtttgttggtcattggcgatggtaaaatgttccattgtgaaatcaccgtctacctcgtcatacgaataccaatcacgggagaaatcatttgctcctacaggcatccggcaaatcgtgaagttggctccgactccggggaaaaaaagctcttccatgatttcctcacgtacacttggctccagcttactcaaggaaagccaacctaattcattaaaacaggctccgaaaccatcaatttgttgttgatgcttttctgttagaattgttatatcaatattaggtatcgtatccgcaagggcggagatcagatcgggttgctcagcccaaggggtattctcggttgtcgttacccactcggcacggggggtgaaagagcaggaagaaaggtataaagatattgagagtataaaaacaggtattttcatggtcgtttcattaatttataagtttagaaccatttaaacacggactacacggatgacacggataaatactaataccgtgtcatccgtgtagtccgtgttccataatccactattctctaaaagcgttctatcagctcctcgatagtcacaaggttttgctcacccgtgagcatattctttaagttgattttattctcggccatctcattctctccgactatcgcgacaaacgggattttcttagcgtccgcatatcccatttgctttttcattttagtagactcaggatatagctccgtacgaatccccgccttgcgaaccttagcgatcaacggcaataaatgaatctcctctttctgtccgaagttcacgaatagaagctgtgtagtcttcaaagacccttccggatataaatccaattggttcaatacatcaaagatacgatcagcgccgaaagagaaaccgacaccagatacgccttccatgccaaatacccctgtcaggttgtcatagcgaccaccacctgtgatactaccgatctgtacgtccaaggctttcacctcgaaaatcgcacctgtataatagtttaagccacgagccaatgtcagatcaagctctaattccgcacggattggcgtatgagagatgcgctccaagataaaatccaattcggctacacctttcaaaccagtctcagacgcagataatacctctttcaaggtagcgatcttttcttgatttgaaccctgcagcataatgatcggctgcaaacgctcgatcgcctcctcgggtaaacccttggaacgaagctcttcattcacgttgtccaagccaatcttatccagcttgtcgatagctaccgtaatgtctacgatcttatccgcctcgcctatgatttcggcaataccggaaaggatcttacgattgttcatcttgatacacacacgaatgccaaaacgatggaacacctcgtccataatctggatcagttccacctcattgatcaaggaatcagaacccacaacgtcgccatcacattggtagaactcccggtaacgtcccttttgcggacgatctgcacgccaaaccggttggatctggtaacgtttgaacggaaaactgatctcattacgatgttgtaccacgtaacgggcgaacggaacggtcaaatcataacgcaagcctttctcacaagccttagcagcaaatctcaacgggttcttttccattaactcctcatccgagataccagcgaaacaatcaccggaattcaatatcttgaaaaggagcttatccccttcctcgccatatttacccatcaatgtagaaaggttctccatggcaggagtctctatttgctggaagccatacaagtgaaatacttcacggatcgtgttgaatatataattacgtttcgccatttcctccggcgaaaagtctcgggtacctttgggtatggaaggtttttgcatgatcttatgttttaaatgattattctgtccgcaaaggtaatgtttttgctcgaaataaataagaaaataacaatgcccactgtaaggagcttacaatcgcagttataagcatcttacaatgggcattctaacatctttataatgggcattcgaggaaagcctcctccgagacttatcaatccctgcttcttccccccaagaatatcattatataatataataatgtagcaagcgaacctaacgctgcgaccacgtacgtataagcggcggaacgtaaagcgtcctctgccttatcatgcgtataagcatttgttataccggcattgctcaaccacgctaaagcacgttggctggcattgatctcgaccggaagcgtgataaagctaaatagcgtagtcgtagcgaacaagattataccgaataacaatagctgaggaaacgtatgcaataataacataccacccagcaacacccatgtcatgatattagaggcgaaactaacaaccggaaccaaagccgaacgcattctcaacggagcgtaagcggtagcatgctgcacagcgtgaccgcactcatgggcggcaaccgcagcggcggcgatactattgctataataaaccgactcactcaagttcaccgtctggttagcgggattgtaatggtccgtcagatgtccgggtgtagaaatcacctttacatcatagataccattgtcatgcaacatcttctcagcgacatcttttcctgtcatgccattcggcatagggattttcgaatacttctcaaacttgccctgaaggcgggatgacaccagccaactcaatagcgcaaatccaataaatataatccaatacatactcataaatttctatcttatttagttttataaaacaacgacaaaaagtttgccaaagacaaaaatggcaggagacaccccttgaggaatgtggtcttctgccattttgtacgatttataacgagtttattcttctgtatatctgacaatcgtctgttcacgatccggtcctacggaaacgatcttcacaggcacacccagttcttcctccaagaaagaaaggtaagcgttgaactcctccgggaactcatcctcgctctgcatcttcgtcatgtccgtcttccaacccggtaactccacgtatacaggttcgatcgtatcatcgatctcatacgggaactcattagtctcgacaccattcatcttataagccacgcaagccttgatcgtatcgaaggtatccaacacatcactcttcatcatgatcaattggcttacaccgttgatcatcacggcatatttcaaggctaccaaatcaatccaaccacaacgacgtttacgtcccgtaaccgcaccgaactcatggcctaattgaccgatcttatctcccacctcatcaaacaactcggtcgggaacggaccactacctacacgtgtacaataagccttgaagattccatatacctcaccgatattccggggagaaacccccagtcccgtacaacatccggcacagatcgtgttagaggaagtcacgaatggataagaaccgaagtctatatccagcatcgtaccttgagcgccttccgccaagaccgacttaccttccttcaaatagttattgatgacatgctcgctatcaatcaatttgaattgtttgaggtagttcaaggcctccatccattgagcctccatctcggttatatcatattcatagttcaatgaacgcaagatcgcttcatgttttgctttagcggccgcatatttctcttcgaagttatgcaataaatcgcccacacgaacaccgttacggctaatcttatccgtataagtcgggccgataccctttcctgtcgtaccgatctttccggaaccttttgcggcctcataagcggcatccaagatccggtgagtaggtaaaattaggtgagctttcttagagatataaagctgcttggtgatatcgtgaccactcgctgccaatgattccgcttcctgcttgaacaataacgggtccagaacgacaccgttaccgattacgtttatttttccaccttggaaaataccggaaggaatcgaacgtaacacatacttttccccgttaaactccaatgtatgtccggcattagggcctccttgaaaacgagttaccacatcgtaattcggagtcagcacatcgacaaccttgcctttgccctcgtcgccccattgcaatcctaacaaaacgtctactttcatcttttctatatttattataggctattaatattcttatttaactgacctttgctgcttaaacttgcatttactgcacaggccataaatgtacaaacaataatactccggcgtaaaacgagagactttcaagtttctcatatccgctttcaacgtactgtttcgcagctcccggatggccccgcatctcgtacaaaccaaatgcaaatgcgtatcggcataaatcctcaactcatattgcaccgactggacggttatttgatgacgcaccaccaaaccggcatcaaccagtacatccaacgtattatagagtgttgccttactgacatggaagttgtcttgctccaaccgatccgaaagcatacacacatcaaaatgaccgggaaaagcacatatttccttgaatatagtatatctctcctcggttttccgcagtttcttctccgttagatattcggtaaacaacgcacgtatttccgtataaactttcgcttccatctcctaaagaccgcacaaacgacaaagttagcgcatttattttaaacgcaaagccttaccgataatattcaaactcgaattttaattcattatagatttcttgtaattccggcgtgtttcccacagcctcctgaaattccttgaaaccgtctaggatcctttccgcattcccctcggattgacgcccataaaacttcatggcttgaatagacgcttgtttctctttcagcgtagacttaaaatccttagtctccgctaagctgcttaaggtttctaccaaaaaagatcctaaaaccacagaagacaagctaccacctcgcttgaaattctcggtccaagtaagaaaggcgaccgtgcgagcgaactcatttttcttatcagcaaccagatcaaacgtgaagtcctccatataaggcagatgaacgaacaagttccggcaacaatgctccgcgatctccaaataaggaatctccttgacccaacgtttcgcttcctccaaaggcaacttctcggcgggttggagaaaggtcgccaatatcttaaactcacgaatatcttctttccatagagccgccgccagttctccattcggtttatgcttgcgggcgatttcttttatttcggggtacggaaccccgaaatttaacttatatacgatacctttctcacgcatactcgtagaaatcaccccgttcatcgccaaacgaagttgcttgcggatctcccttatctcgtcttgtaaactttccatctattaattattataagtcggcaagaaagaataatcacggccataacgaagcatctgatctgtataaccttccgtatagtccaagacaatatcagtaacctcaccgttagagttctttacctctttcatcacagggttgacaaaacctttatagggagccaagtttaacttagcatagcgctccaagacctccgcatgcagttccggatctactttcacgccgtatccttcaacaagattctttccggccgcatagtcaccctcactcttgatacgttgaatctcagcgagcaatgttccaaacaactcacgtaacctcggatagtcattcacaaccacataggtctttccatcccgttttttcagttcgatcacattcgctttcttccctttctcgtaagcccacttagcgatcaactgacggttacgcatatgtgcctcctctacattcttgcctaactcgatacgaaccaactgggtcatcaagccattcattatatatttatagtattccgatttataagcctcgccgtccggaagcaatcccagttccaccagcttcggatctgccaaataatacaggccaaacaaatccgcacgggtttcctccagtgtagagctataggctttcagcgcatccgggtccgtattttccagcaatttaccggaaccatgtcccagacactcatgtaaatccgtatgtagattatccgttaagaaaccgtactgcctcataccgttccgctccacgtcactccatacaaactcttcgctaaagccatttccctgagatgccttatcataagcctccgtgatattctctatcgtaacagacttcgagccatgatctcgacgaatccaatccgcatttggcaaattgataccgatcggggtagccggatagcaatcacctcccaacatagataccgtgattaccttagcgctgactcctttcaccttctctttcttgaaacgcttatctaccggagaatgatcctcaaaccattgcgcattatcactgatgattttcgtacgcttagtcgcctccttattcgtaaaatttacggtagactcccagcttgccttcattcctaacggatccccataagtctcaataaagccattcacgaaatccacctccgaagctgtatcctctacccaaaggatcgaataagcatcgaaagtcttcaaatcgcccgtttgataatattcgatcaatttcccaatgatcgctttctgcgtatcattctcggcgaaaggcaaggcttgtcgcaattgatctacgattttttctatcgcggcggaataaagccctcctactttccaaaccttttcaacgaccgtaccgttctcttttaccaaacggctattcaacccgtaagagatcggcgagatcgtatcttttcccatcttcatttgcgcatagaagtcctctacctctttttgactaatgcctcccccgtaataattattagaagaagccttgatcagatcaccgtcaccgctttgtacgctacgctttgacataacacccggatcaaagattaccggagcgatctcgatcatgaactgatccacgttttgattctcacgaagaggtaacttcttagtgtcgatttggtgaatacaatccatcaagaactcaggagaaaaccccggggcaaacttgtccaacgcataatgatgatggataccactggagaaccacacccgtttcaaataggttcccaaagccttgaattgagggtcctcccgatctcccttataattcgtataaatagcctccagtgtcctgcggatcgccagattatagcgtccattctgatcgaagaatatatcacgtcccatcaaggccgcttcggaaagatgatataatagttgcttttgtcgcaaggacagggattcgaaacccggaactttatagcgaagaatctccagatcagcgaactgatccactacataattgaactccttatcggaattttgagatgccgtatccgactgttggcctgtacaagccgtcataaccatagctgtcataagcgataacattatttttttcatatcttactacgatttgcttttcctataatatattacatctaaagtacatagtttgaaggcccgcattccaataagggccaaccgcaaagatagagaatatacagtcaatatcaaaggtttgagattttttctctacttttgtaagttcaaaagcaaagacaaaaaagagaatggaaatagcggcattagtttcaggaggagtagacagctctgtcgtagtgcatcaactcaaagaggcaggatacgatccgaccatcttctatatccgtatcggtatggaagacaaggatggctatatcgattgcccggcggaagaggatatcgagatcacctcatatatcgcccgcaagtatggatgccggttcgagatcgtctccctacacgacgagtattgggatcgggtggtaagctatacgatcgaatctgtcaaacgcggtcttacccctaacccggatatgatgtgtaataaatatatcaagttcggttgtttcgaggaaaaatggggcaaggatttcgataagatcgctaccggtcattatgccacgaccacggagatagacggcaagatatggctttctaccgccaaggacccggtaaaagatcagactgatttcttagggcaaatcacccgcctacagatacagaaactcatgtttccgatcgggcatttaatgaaaagcgaggtacgtgccatcgccgaggcccagaaattgccgagcgccaagcgtaaggatagccaaggcatttgtttcttaggtaagattaactacaacgactttatagagcgttatttagggaaacgcccgggaaaaatcgtggaactagagacgggtaaggtcttgggtaaacacaatggatattggttccatacgatcggccaacgtaagggattgggattaagtggcggcccttggttcgttatccaaaaagacattaagcgaaatatcatttatgtctccaacggctacgacccggaaacgcaatatggcaaggtgattaatatgcaaggtttcgatttcatcacggaagatccatggggagaatttgagggtgagaaagaaatcactttcaagatccgtcataccccggaatttacgcatggctacatccgtcgtatcggagatctatatcgtgtagaatccgacgaaaagattcaaggtatcgctcccggccaatacagtgtaatctacgacaaagaccatcacttatgtctgggcagcggcatgattattgatgagaccaagtaacgcatattcagatttattctaaataaaaaacggtcgcctcaaaaggaagcgaccgtttttatttttctatcttattctattaaatagcatacaaagagctgatagactctccactacatacacgacggatcgcctcagcgaacatgtcagcgacagataatacctttactttctcgcatttcttagcgtaaggaatagaatccgtaaagatcatttccgctaaagcggactgatctacacgagtagaagccggatcagacatcacagcgtggctggcgatagcacgaacagacttagcgccattctccaacatcaagttcgcggctttcgtaattgttccggccgtatccaccatgtcatcaaccaaaaggacatccaagcccgtcacatcaccgataatacgcatctcggccacctcattggcacgcaaacgagatttgtggcaaatgaccatcggcaagcctaaatacttagaatagctgctggcacgtttcgtaccaccaacatccggagtcgcgatacacaagttatccaaaggcaaagacgtcttgatataatccaagaatacggaagaagcatataagtgatccaccggaacattaaagaatccttggatctgatccgcatgaaggtccatcgtaatcaaacgattgatacctgccgtactcaacatatcagcgatcaacttagcgccaatagaaacacgaggcttatcctttctatcctgacgagcccaaccgaaataagggactacagcgatgattgaatgtgcggaagcacgtttagccgcgtcaatcatcagaagcaactccatcagattgtctgaattagggaatgtagattgtactaagaatacatctctaccgcggatagactcttcataagaaacagagaactcaccatcggcaaagtgctggatattcatctgtcccagaggacaacctaaactgttgcaaattttctctgcaagataccgggagttcgttcccgaaaacaccaagaaaggagtttgtgcactcattattccgaatatttatcttaaagtgaatagatttaaattgtgccgcaaaagtacaaaacttatttacaataacctctttatatttggaaaactttctatatttgcaaccgcaatgatgaagtttttactctatttcttcgtattggtaagtgtatttctgacttcgggttcttcatcaactcccgagaaccaacagaaatacaacgatatttacaccatgtactctccgaatgaagacaagacggaatacaatatcccccaagcagatatcgaacgatacgaaaaagagctatacaacggaaaacaaagctataagatggaagatggctatatcagggcttcactattccgcaacacctccacatcaaaaaactcaaggacaaacctatcctcatccgcggaaaggatcgtacggtttataaaaactcaatatcctaaagaaagacaaacattcatttcattttgtataaatccccttaagttctcctatgggtactatatctatactctaagacgtattctcatttaaactctctttcccccttatttccatcaaaaaagtagaagatagcactttaatgtctgcattctcactattcttattttctagatttctcaaagggaacagaataaacatctattttgttttcttattgggtcatataggatagttattatcaattaataatcaatctaaaatggaatttttattagacttcatcttacatatcgatcagcatatgatcgagatcgtacaagaatatcatacttgggcctatgcgatattattcctaatcattttttgtgaaacgggattggtagccaccccattcttgcccggggattccctcttgttcgtcgccggagcgataacagcgttacccggtatgcctttagagataaatctcttagccttgatattattcgcggcggcagtattgggagactcctgtaattatatgattggtcattttttcggtcgtaaactatttaacaatcccaactccaagatattcaagaaaagccatttggacaaaacgcatgagttctacaaaaaatatggaggcaaaaccataatcatcgcccgattcgtaccgattgtccgtactttcgctccctttgtagccggaatgggtaaaatgcattattactatttcatgatctacaacctgataggcggcgctttctgggtactgcttttctgctatgcgggatactttttcggagatcttcctttcgtacagcagaacctcaaggtattgatcatagcaattatattcatatccatacttcctgccgtaatagaggtagtacgggctaaactaaaagcacggaaacagagataacaaactttcattcaacaaccaagtatttaaaaacgatttaatatatacatgtatgaaaaattctttttttagtcgattcacccccaaagaacccaagttctttccactcttaaagcaattgtctgaaatattatccgcctcttccagcattctggtagaaagcttgcgacatgattctcctacggaaagagctaattattataagctaatcaaggataaggaacgggagggggacaaactgacccatctgatctttgatgaactaggaacgacatttataacccccttcgatcgggaagacattcacgacttagcctcatccatagatgatgttattgatggaataaacagttccgccaaacgtattaccatctataacccacgccccatctctgatagcggaaaagaattgagtttactcattcaacaagaggcgcactatatcagcaaagcgatggatgaactcgagacttttcgcaagaaaccgactacgttacgtgattactgtaccaagctacatgacatagaaaaccaagcggacgacgtatatgagctttttatcacgaagcttttcgaggaagaaaaagatagtatagagcttatcaaaatcaaagaaatcatgcatgagttggaaaagacaacggatgccgccgaacatgtcggtaaaatattaaggaacttgatcgtaaagtacgcataaaacagggctatattatggaattattagtgattatcatcattctgtctctgatattcgattatatcaatggctttcatgatgcggcaaattcgatagcgaccattgtatcgaccaaggtccttaccccttttcaggctgtaatatgggcagcattctttaatttcgtcgcatttttcatcgctaagtatataatcgggggattcggtatcgccaataccgtatcaaaaaccgtagtagagcagtatatcacattaccgattatcctgtccggggtaatcgccgctatcgcatggaacctgttcacttggtggaaaggcattccttcctcttcttcccacacccttatcggaggattcgccggagcggctatcatggcacacggctttgaagcgatccaattgaacattatcctaaaaatagcggctttcattttccttgctcccttcataggcatgattgtcgctttcgggtttaccttattagtgcttcatatgtgcaaaagagtgcaccctcatacggcagaggtatggttcaagaaactccaactcgtatcttccgccttattcagtatcgggcatggattgaatgattcccaaaaagtgatgggtattatcgccgcggccctaatcgcagcccactccgagggattgggaatggggataaatagtatttccgatttacccgactgggtagcgttctcttgtttcaccgctatctcacttggaaccatgtccggtggctggaaaatagtaaagacaatgggtactaaaatcacgaaggtaacccccttggaaggggttatcgctgagacagccggtgccttcactttgtaccttacggagtttctgaagatcccagtcagtaccacgcatacaattacaggggctattatcggagttggtgcgaccaaacgtctttcagccgttcgttggggagtaactcaaagcttgatgaccgcatgggttcttacgatcccggtaagtgggcttttagcagctggcatttattatatggcttcccttcttttcatttaaatcaaaggaaaaagtcacctagcttcatcgggcaagtatgttaagttactttgccatttcacttaagttacttgcccgatgaagctagctgtcccgtatcaaccacctaactccaccaatgaattatctatacagcactcctaaacttttcaagaaagctcttacttatggagaaaagagaactttagcattttgccggaataagccgggagtttcacttgataaggataagcgtctgttagcgtactgatagtcgtttccccggttaacaagtcggtcaattcagccggtttgttatcctcaaaatcaagagccttgaatgcctcgaccgggatatttacccatacacattggtcggcacggtcgaaattcacgaccaccagaagtacctcgttcttccatttgcgcaagaacgcatactgacggttcggattgaaataaggattaccggagttcgcgtacatcaaatcataaaacgctccctcgacaataaccggctcggatcgtaccacattcaataacttagcgtacatctcacgcaacgagcgttctgccggcgttaatttagccccgtcaaagagtccattattattccagttccgcaaactctcgacgctccaataatcgaagatggtcgtacggccatcacgtccactgaaaccttcagcgtccattcctctttcgccaagttcctgaccgctatagatcataaccggattcgtattcatggcagcggagacaatcatgcccggaatacccggacgagcatcccccgcaaagaaatcagaagcgacacgctgttcatcgtgattctccaagaaattcaacatatttttctggataccctccaacgattgccaacaatgcgatatattactagccggagcctgtccgcacatcaccgcacgaaccgtatcataaagaccaaccttgtcatacaaataatcaaagtgtcccgtataaatataattcctatactcatccggattatacacctccgctataaagatcacatcacgcaccttcttcacctgaggaatcacccagttccaaaactcgaccgggaccatctccgccatatcacaacgaaaaccatccactcccttatcagcccagaacaacaagatctccaacattttctcccacgtattgggaatggtattgaaatggcaagcaccaccgtgcatataatccacgccgtagttcagcttcaccgtctcataccaatcgttctggcttggataggcatcgaaatgattgttaccggtcaccttcgccgggaactcactataggcaaaatcctcctcacgctgcggatcaaaacgaagcgtcaaggtctgccccggaagataataaaagttattattcacatcaaaagccttggacacattatccgtttgacctaagtcctccacgaaaggttcccgtgcgtccgagaaatattgacgtgctacatggttgggtacaaaatcgataataaccttcatcccagcctcatgcgtacgtttcaccaaatcctcgaactcactcatacggttctggatattatccgccaaatccggatctatatcatagtaatcttttatagcatatggagatccggccttaccttttactacggcagaatggtctttccggatgccaaacatggtgtaatcggtttttgtagcgtgctctatcacccctgtataccatacatgagtaacacctagttctttgattttggataaagccaaaggagtaaaagccgaaaacttacccactccattctcggctaaactaccattcattacaggagatggtcgcagattcccaaaccaacgcgggaatacctgataaattaccatcttgtttttttgttccattgcgttcatctatatataaagtttttgtgggaaagcgctttgtccagacagacgatttgtcacagcatcaggcctttctttcttgccgcgatcgctttcaccaaggtttcatatttattctcatccaacactttctcaaagcaacgggcagcggcggaatagccaatattacaaatcacgtctacattctcaagatcgaatgtcttatataagccaaactcctccgcttctattaagacatcacacatctctcgatcctccagcgtatttgcccggaacatataatgataagagcgctcggcgatatggaatatggtctgcttatatttttgcgggatcaacgggcttacgttcaccccgataatacgctcacattcctcacggatgatggagaccggaaagttgtgaaataatcctccatccacataatgaacgccattgatgactacaggactgaaaataatcgggatactacaagaagctgtcaccgcctcaacaataggaccactcctaaattcatggctttcgccattatccaaatcagtcgcgacaaccaccagaggaatttgcaagtcctcgatgttcttggtccgcaagtgtcgcctcaagaaataacgaaagcgcttactatcgaacaaacccgccttaggaatctgcaactgggcgaattccgagaactcacgtccggtaaaaagctcttggatctccgccgccgaataaccatcagcaaacaaagcgcccattaaagctcccgcactggtaccgactataatatccggtcttagcgcacattcttccatcattcgaaatacgccgatatgcgcaaaacctttcgctccgcctccgctaagcgccaagcccaacctatagggtttatggtttgtctcttctgccatttatttcttgtctcttaatctggtaacaaatatgctgttttttttaattagaaacattattattagggaaaaagtttccatcctcttttatttttgctacatttacacggaaagcaaaggtgttgtcacattgttttcttaagtataacattaaatctaccatgttatgattacgagtattttctggattatcccgttagcgtctgtcctagcgctagcattcgcctggttcttcttcaggcaaatgatgaaagagagtgaaggaactgagttgatgaaaaagatcgcctcctttgtgcgtgaaggggcgatgtcgtatctgaaacagcaatacaaagtagtcgcctcggttttcgttgtcctagtaatcttattctctattatggcctatggcttccatgttcaaaacgaatgggttccgatcgccttcctgacaggaggtttcttttcaggattagcgggtttcttaggcatgaaaacagcgacttatgcctcggcccgtacagcgaacgcagcccgcacttccttgaataaaggtttacaagtggctttccgaagcggggcggtcatgggcttagtagtcgttgggcttggattgctggatatctcattctggtatatcctgttaaatgctttcatcccagacgaggctttggacccgacccataaactcaccattatcacgacaaccatgcttacattcggaatgggtgcctccacgcaagccttgttcgcacgtgtgggaggaggaatctatacgaaagccgccgatgtcggagcggatttagtaggtaaagttgaggctgggatcccggaggacgatcctcgtaacccggcgacaatcgccgataacgtaggcgacaatgtaggtgacgtcgccggtatgggagccgacctatatgaatcttattgcggttccatcctagcgaccgccgcattgggagccgccgcattcgtttcttccggaagcgtagaattacaatataaggcggttgtcgccccaatgcttatcgccgctgtcggtatcattttatctattattggtattttcgccgtccgtacgaatgagaacgcgacgatcaagcaactactgaaagccttagccataggaacgaacttgagttccgtattgatcgctatctccacgttcgggattctttatgtattaggcatggagaattggttctggatcggttgttccgtgatcgtaggtctgctagtcggaatcgtgatcgggcaagcgacggagtattatacctcccagtcctataagccgacccggctggtttccgaatcggggctgacaggcccggcaacggttattatctccggtctcggactagggatgctctctacggccatcccggtacttgccgtcgtggtcggtattatttgttccttcttgttcgcctccggattcgacttcacgaacgtgggcatgggattatacggaatcggtatagctgccgtaggtatgctatcgaccttaggtattacgttggctacagacgcttacggtcccatagcggataatgccggaggcaacgccgagatgtgtaacctagggaaagaagtccgcaagcgtacagacgcattggattcattaggaaatacgactgccgctacaggtaaaggtttcgctatcggttccgctgcgttaaccggcttggctctgttggcctcttatgtagaagagatcaagatcggtttgctccgtttaggagagaccgtcctgaactttaccgatggcaggagtatcgaaatatctaaagcctcattctcggactttatggtatattatgatgttaccttaatgaatcctaaggttttagccggaatgttcctaggttccatgatggcattcatgttctgtggccttacgatgaacgctgtaggacgtgcggccgggcacatggtggaggaagttcgccgtcagttcaaggaaatcaagggtattctgactggagaggcacaaccggattatgcccgttgcgttgagatctcgacgaagggagcgcaacacgaaatggtacttccctccgttttagctattatcgcccccatcttaacgggactcatatttggtgtgacaggcgttgtcggactattgatcggtggattaagcacgggcttcgtattagccgtattcatggcgaacgccggaggagcatgggataacgcaaagaaattcatcgaggaaggaaaccacggcggcaagggtagcgaggcgcataaggcaaccgttgtcggcgatacggttggcgatccgttcaaagacacttccggcccgagtttgaatatccttatcaagttgatgagcatggtagcgatcgtgatggcgggattgacggtggcttggagtttgttttaatagttgaccgttagtagttggcatttgacagttagagaagtaaatcgacaatttaatagagaaaactaaataattgtcaatcattgactgtcaattgtcaactgttttgtatttttgcgtcgtaaaaacataaaacaattcaacaatgtcaatctcacgctttaatgctgtggagaaggcatccaaccgaaaggccgtggaagccgttactcccgaacacaaagtatctgagtactatggcgagaatgtcttcaaccggaaggcaatgcagaaatatctctccaaggaaacgtacaaagccttgacccacgccattgacaatggcacacctatcgaccgggaaatcgccaatcatgtggcagccggcatgcgtatgtgggcactggaaaaaggagtcactcattacacccactggtttcaaccgcttaccgatggcaccgccgagaagcacgacgctttcgtggaacacgatggtaacggtggcatgatcgaggagttcagcggcaaattgcttgtccagcaagaaccggacgcttccagtttcccgaacggtggacttcgtaataccttcgaggcccgcggctactccgcttgggacccctcctctcccgcttttatcgtagatgacacactttgtatcccaaccgtatttatcgcttataccggtgaagcactggattataagaccccgctgatccgctctatcgaagtattgggagaagccgccaaggacgtatatagatatttcgatgaggatgtcaataagataattacttacctaggttgggaacaggaatatttccttgttgacgaggacttgtattccgcccgtccggacctctcactcaccgagcgtaccttgctcggacatgagagcgcaaagaaccaacaattagacgaccattattttggcgctatcccctctcgtgtacaagaattcatgaaagacttggaaaccgaatgctataaactaggtatcccggtaaagacccgccataacgaggtagcccccaaccagttcgagctagctcctatttacgaggaatgtaacctagccaacgaccataaccaattattgatgtcggtcatgaaacgtgtctcccgccgtcataatttccgtgtattattgcacgagaagccatttaacggggtaaacggttccggtaaacactgtaactggtctatgggaacagacaagggggtaaacttattctctccgggtaaagaccgtgaggacaacctacgcttcatcaccttcgtggtgaacactatcatggccgtttataaatacaacgctttattaaaagcgagtatcgcttccgccacgaacgcacaccgcctaggtgcgaacgaggcacctcccgctatcatctccactttcctcggaacgcaaatcagcgagatcttggataagtttgagaatagctctatcgaggacgctatcgaggtagacgataaaaagggtttgcatcttggcttcgggcagatccccgaactgctgttggacaatacggatcgtaaccgtacctctcctttcgctttcaccggaaaccgttttgagttccgtgccccgggttcttccgtgaactgcggatcagccatgttagcgttgaactccgccgtagcctatcaattgcaacaattcaagaaggacgtagaggctttgcaagcggaaggaaaaagcaaggaagtagcgatcttcaaggtgctgaaagcctatatcaaggaatctaagccgatccgcttcgatggaaacggttattcggacgaatggaaagaggaagccgccaagcgaggtctggattgccaaaatagtgttcccttgcaatatgacgcttatcttaaaccggagtcgatcgagatgttcacgtctaccggcgtacttacccagaaagaattggaagcgcgtaatgaggtaaaatgggaagtctatatcaaaaaggtacagatcgaggctcgggtattaggggatttatccttgaaccatatcatcccggtagccgttcgctaccagagcgtattgctggataatatagcgaagttgaaagagacattcggcgatgacccggaattccgcgatatgtcggaagagccccgtcgcttggttcgtaagatagccgggcatatctgtgccgtgaccaagaaagtggatgagatggtagaggcccgcaagaaagcgaaccgcttgaccgatatgcgggaaaaggcgatcgcttaccacgactcggtagccccttatttggatgagatccgtgaccatatcgatgatctggaactgatggtggacaaccagatgtggccgttgccgaagtatagggaactcctgtttatccgataaaaaacaccaatactggcgttgccttgcgccagtatcggcatagcctcacactgatataggcgcagccttacaccgatacaggcataaggctacgcctatactcccgtttaccacttcacataagaagcattcatcaagaagtcataatcatgtttcatcgcttgcaacggtgtcatattataacgctcttgctcaatgaagtaatcctctaatccggctttctccgccacagcgaataaggatttgaagtctacgattccggcgcccatctctgtgctgccctttccatccgcgttcgcgtctttcaagtgccagttggcgaaacgaccgggataacggttcacgtaatcatgacatttaaaaccgccatacactaattgagccgtatcgatctggaaagtaaccagccctttgtccgtattctcgatcatcacgtcgaacgggatctttccttccaactcatggaattcatccacatggttatggaaagcgaaacgcaacccgttcgcctttgcgatctcaccacatttattaaattgatccactaaacgcttcacgtccgaaaggctcttgatatctttggagggataacccgcctgaacaatccatttacagcctacctctgccgtatcggcggcattctttttccagaagtcccatcccttggtatcaccctccgccagcaaaccgcttccggtatgggaacctaccatacgggcacccagatccgccagatatttcttcatctcggccggggatttcccgtagaatttgccatcccggtaaccggcggcttccatccgtttataaccgatatccaccaaagccttcatcgtaccgtcaaaatccgtcttcaagtcgtcccggacactatacaactgtactcctatcgctttctctttcttagccaagatagaggcaaagccattcggtactacactcagcgcagccacagcggcacccgctttcaaaaaattccgtctcgttatcatcatactattctttaagattaacggcgctaaaggtagcaaaattatttctactttcgcgcacatttaaacaaacgatcatgcaaggaacaaaaaatctgaccgaaggggtcatttcccggcaactattcaatctggcgatgccgatcatgggtacctcatttatccaaatggcctatagcatcaccgacatggcttgggtaggccggttgggaagcgaggccgtagccgctatcggcgccgttggtatccttacttggatgacgaactcgatctcttacttgaataaagtaggctcggaggtgagtgtcgggcaaagtatcggggcgcaaaacgtggaagatgcccgaggattcgcttcccataacctaacgatcgccttgatcctctcgctttgctggggattcttgctattcgtcctcgctcgtccgattatcggcttctacaaactggaggaaccgattgcgttgaacgccgtggaatatttgagaatcgtcgcttccgcattcccatttatcttcctctcggcggcgtttaccgggattcataatgcctcgggattgagtaagattccattttatatcagcggaacaggtcttttactgaatatggtgctagatcctttatttatactcggcttccatttgggtacggcaggtgcggcttgggctacgtggatctcccaagcggtggtttgcggactattcgtctatcagctaaaatgccgcaataaattgttcggtggattccctttctttgtccgtttaaaggaacgctacaccaagcggatcttccaattgggcctgccggtagcgttattaaatacattcttcgcgatcatcaatctttttatggctcgtacagcttccacctacggagggcatatcggtttgatgacgcttacggcaggtggacaaatggaggcgatcgcatggaacacctcacaaggcttcagtacggccctctccgctttcaccgcccagaactacgccgcacacaagaaagaacgtatcctgaccgcttatcatacgacgcttaaaatgacttcgatcatcggcgtgctctgtaccttgctattcgtcttttacggtagcgaggtcttctcactgatcgtgccggagcaagccgcttacgaggctggcggcatattcctccggatcgatggctattcgatgatcctcatgatgttggaaattaccacgcaaggcatgttctacggtaccggccgaacagttccaccggcgatcatcagcatctcgtgtaacaccttacgcatacctttggccatcgggctggcggcagcgggactgggtattacgggtgtttggtgggcgatcagcctttccagcatgctaaaaggtatcgtcgctttcatctggttcagtatcttacagaagaagatcttgtaagcggaacaattcttaccgattttccgtacattcgcgattaaaatgacattcaattaaaaaacaacctatatggataacaaattcaaaccggaaaccctgtgcgtacaggccggttggcaacccaagaaaggagaaccccgtgtcctcccgatctatcaaagcacgacattcaagtatgagacgagcgagcagatggctaaattgttcgatttggaggaaagcggctatttctatacccgccttcaaaacccgacaaacgaggctgtagccgccaagatcgcggcgttggaaggtggcgtggccgccatgctgacctcatccgggcaggccgctagctttttcgctttcttcaatatttgcgaggctggcgaccatatcgtaagcgctaccagcatttatggaggtacttataatctactggccgtcaccttgaagaagctgggaatcgaatgcacgttcgtagatcaagacgcgagcgaggaagagatctccaaggcgttccgcccgaacacgaaagcgatgttcggcgagatgatctccaatccgggcgttatggtattggacgtggagaagttcgcccgcatcgcccataatcatggcgtacccttgatcgtcgataatacgttcgccacgccgatcaattgccgtccgttcgaatggggagcggacatcgtcacgcactccacgaccaaatatatggacggccatgccacgagcgtaggcggttgtatcgtggacagcggcaatttcgattgggaagcgcatgccgagaagttcccgggactttgccaaccggacccttcttaccacggattgacctataccaaggcattcgggaaattagcgttcatcacgaaagcgactagccaactgatgcgtgaccttggagcgatccaatccccgcaaaacgcattcctattgaatctgggattggagaccttgcatcttcgtgtaccgcagcattgcaaaaacgccttggcggtagcgcagtggctacagaaatgtgataaggtagcttgggttcattatcctgaattggaaggcaatccgtaccatgaactcgccaagaagtatctaccgaatggctcttgcggcgtattatccttcggattgaaaggtggacgtgaggtggcgatcaagtttatggatagcttgaaactcgccgctatcgtaactcacgtagcggatgcccgtacttgcgtgcttcacccggccagtcatacgcaccgccagttgagcgatgagcaattgatagaggctggcgtagctccggacttaatccgcttctctgtaggtatcgagaacgccgatgatatcatcgccgatatcgagcaagcgttgaataaataagacttcagtgccacgctgatggcacacccgtgccatcggcgtggcacacccgttccatcagcgtgacacacccgttccatcagcgtggcacacctacttctccagcatgacactgctataagttcctagataggcaggaatctccccagacgcgccacccaatttgtcgtaatcctccctaggctcgttaccggatgttcctcacgcaacaaatcctcacggaactcacgaagaataagccaatccgcctgtttcacccaatgccggaaaaccggattctccacatggctttccgaaatggataataacgcatccagatcaaaacaatcagcgacaacgcctgcgccagacaaagaggcatcgtaagcattgcaagcttgctcaatatgtgtaggaaccatcaatacaggtttattcagatacatcgcctcacatacggattcgaacccggcggtcgtagcataagccttcgcccccgacatataacgtagaaacaacgtatcatccagctgatggaaagaaaggcaatcgtctattatcacctcggctcgctgatctttcttatcccaaaagaaatgcatcggaaccgaaggatgacgggaatgccaagaacggatctcctcactaaacccgctattcaacaaataaccatgcaaataactgccgttcgagggaaccgcatccaagacttcttgccttaataaaggaggaaccacgactattcctcccaacggcgcctcacgcatcttccgaaaagacaaggctaattttttgacggagcctatcgccgttaatctcgtaaaaaatcgtagcgacgccaacgacaatgtgctctgcttcgggaaaacgaagtccggatgcaagaatagatattgatgggcgatacataccatcgtcgctttcggacggaaaagtaagtaagtcagccccgtcagcagctcgtagaaattcacgacaacatccgcatccgtctgccgaatcatccggtcgatataacggatacttcccatgtatttgtgcagacgcaatacattatataatacgctacgcatcaaactcacttgtttattcttagccgtcggtaaaaaattcggactctcaaacggatataccggcgattgtatcttattcaagaagaaatccggcaaacggcgggccggactttttcctaccaacacaccaacgatctcatgtccttcggccatcaatttctggcgtaaggataacgcttgggtcaagtgcccacgtccctcaccttgtatgataaacaggattttcatacggcatccgcatatagttgtacattattatatgtaacaatatcccactctccttgttcatcctccacgagagcggtcatgctttccacccaatcgccggaatttagataatgcacattaccataccatacgttcgccgcttggtgaatatggccgcaaataatcccatccaaatgcttggcctccgctaagcgtaccaactctttctcaaactccgagatataagagaccgcacttttcacccggtgtttcacctcttgggataaagagaaataaggttttccttgccgctctctacgatgattgtaaaccttattcaaccacaataaaaaagtataccccacatccccaagcatggcaagccaacgcatatgggtcgtaaccgtatcgaaaatatcgccatgtgtcacgaaatagcgttttccttgtctcgtcttcagcaaataatcctttacgatcgatatattggagaacttaaaaggagccaagctgtcgagaaaatcatcatggttccccactacatagataatctccgtaccccttttctccatcatcttcatcaataccttaaagaaatcggtatgcttttgtttccagcgtttaccggatttcttcaattgccagccatcgatgatatcaccattcagaatcaatcgatcgcaatctacgtgcttgagaaaatgggtgacctcctccgtccgggaatgttccgatcccagatggatgtccgagaggacaatagtcggatagtactttcttaatatcatcttttccttgtttaagatgatacaaaagaacaccttcggtattacaagttcacgacaacctagtgaaaaagacataacaaaaaggccagctcttcacaaagccggccttttctcgtttaactttaaatattaaaaaattatgatgacattttactttacctattcttctgattgagtagcctcgtaagcctttaacaacttctcttgtacatcggcaggaactaactcgtaactagcgaacttcatcgtaaaggaagcacgtccgcccgtaatggaacttagtgaagtagaatagttagacatctctttcaaaggaactttcgccaatagtttctcaaatcccttctcgctattcatacccataatcaaggcacggcgtccttgcaagtcgctcatcacatctcccagataatcggcaggaacggaaacctcgacatcgtaaacaggctccaagatcttagggccagcctccttgaaagcggtactgaacgcattgcgtccggcaagcatgaaagagatttcattactgtctaccgggtgcatcttaccatcgtatacgcaaatacgcacgtcgcgagcatacgaacccgtcaacggcccttgctccatacgagccatgatacctttcaagatagctggcaagaaacgagcgtcgatagcaccaccaacgatacagtttacgaacacgactttaccaccccaatccaaatcaattatttgagtatcacgaacattcatcttatactcctgtccgccgaaacggtaggtatccggagcaggcataccttcataataaggctcgataatcaaatgaacttcaccgaactggcctgcgccaccggattgtttcttatgacggtaatccgcacgagccgctttcgtaatcgtctcacgatacgggatcttcggctccagatattcgatcggcaatttatcattattctcgattctccatttcaatgtacgaagatggaactcaccttgaccggaaacgattgtctgcttcaattccttggactgctcgattacccatgtcgggtcttcctcacgcatacgtatcaagatttccatcatcttctcggcgtcagcctcattcaccggcttgatagcacgacgatatttcggatccggatatttaatgaagtcgaaacgataatcacaaccctttccgttcaatgtattaccacggcgaacatcctttaacttaacggtcgctccaatatcacccgccaccatttccgtaaccggggtacgagtttgtccggctaccgcaaataactgtgcgatacgctccttggaaccacgatcggcattcatcaaatcgtcaccttcttttacttttcctgatatcactttaaaataggaaacctgaccaatatgaggttccacggtagtcttgaagaagaacaagctagtaggaccattcgagtccggagtcacctctacgccttccgtagtaatcagacgaggcatcttgtctgtacaaggaaccacgttacccaagaactccaacgtacgacgaacacacatatcacgaccggcacatacgcagaataccgggaacataccgcgagtaaccaagcccgcacggataccggcacgcatatcatcctcgctcaaggcaccttcctcaaagaatttctccatcaacatatcgtcgttctcagcggcggcttccaccaaggcttgatgcaactccatcgccttatccatttcctcggcggggatttccaatacatcaggaactccaccttccggtttccaacgatacatcttcatttttaatacatccaccacagcattgaaagaagagccgcagctaatcggatattggataggaacgatcttactgccccaacggtctttcaactgggcgatggttccctcatagtcggctttatcattatcaagctgattgacaacgaaaatcaccggtttatgaaattgttcagtataccggaactggttaacggttccaacctcaacaccgtactgggcattcaataccatcagtgccgtatccgtgacattcagagcggaaacagctcctcccacgaaatcatccgaacccggacaatcgatgaaattcagcttccgatcctgccattctacactgaaaacggttgagaacactgagtatccatactctttctcaaccgggaaataatcggacaccgtatttcctgcctcaacggagccgcgacgttttataactccaccctcgtaaagcatagcttcagcgagagtggttttcccagagcccgaacttcccaagatagagatgttcttaatttcatttgtttggtatactttcatgatatcaggatttatttgagtttaacaatacgtttatttggcgtgaatcactttcacgagggcgcaaattagagattgtaaaggaaaaaagcaattatcgcccggtgtttgagaactatgttgtgcagcagcaaggttttttggaattaaaatcatatctttgtgtaaagatataattgtgtccatacagatggcaggcttatacatccacgttcctttttgcgccaagcggtgtttatactgtgactttttttccaatacggagatgaagtataaagagccgtatataaatgcacttataaaagagatggaattgcggaagggatatataggaaacgaagcattagaaaccatttacttcgggggaggcactccctctcaattagacgagaaggatttcggtaagatattcgaagccatctatcgtctttttgatgtagccgagcaagcggagattaccttagaggcgaatccggatgacatgaaacgagaatatgtatcgcttctccgtaattatccttttaaccgggtcagcatgggtgtacagagttttcatccggaagatttgcgttttctgaatcgtcgccatgaccgggaacaagcgattaaagcagtagaactatgcaaggaatatgggattacaaatatcagtatcgatttgatctacggacttcctaaccaaacgaagcaagcatgggaagagaatttgcgacaagcgatccggctggatgttccccatctttccgcttaccacctcatttacgaagaaggtaccgcactttacaaattaatggaagcgggaaaagtaactcccgtagacgaggagttaagcgtctcgttcttttccacattaatagaccggttggcagaagcgggctatttgcattacgagatctccaatttcgcccgtcccggattcttctccaagcacaatagctcctactggaccggaaagaaatatctggggctcggtccttccgcccattcttataacggaatagaccgggaatggaatccatcttctctacctatatatatagaaggtatagaaaatgggcatccgacaatagaatccgaggatttagacctatgcacccggtacaacgacttcatcatcaccggccttcgaaccatgtggggagtctctttcgctgatatccagacaaaatttggcaggaagctcctttcttattgtcaaaagcaagctcaaccccatatcaaccaaggtctcttattacaaaccggtgacaaattgattttatccaagtcaggaatcttcgtttccgacggaatcatgagtgatctactttgggtataaaaattaacaaaaccaccactttccccaacaaatctgttagttaaaagtacatctcctgcacattttcacgatttttgagaaataaaacgacgcatattaaaaaactattacatatatttgcagcatcaaaaacagcaaacagtgccatatttgtatataatatcaggttgcaacggagcaggaaaaacaacagcttccttcacgattttaccagaaatgctaaaatgtagggagtttgttaactcagacgagatagccaagggactttccccttttaatgcagacagtatagccgtcgccgttgaagctagtcgtattatgtataagcggataaaggaactcatcggtgctggtgagactttcgcaatggaaactacgctggccacccgttcagtcgcaaacctgatacgggaagcacaaagggaaggttattatgttacattgctttacttctggctgaatacgccggatctagccgtggaacgtgtaaaaatgagggtagccgccggaggtcacaatattccggaagcaacgatacggcgtcggtatgaggccggtatccacaatttatttgagctataccttcctattagtgactattggatgataactgataattcgatgtctcccatggaagtgatcgccaagggattcaagaatgataaaagggaagtgtataatctagatatttttacaaaacttgaacatcatgaatgagcaagaagttagagaattcgaagagaatatagtaaaaggtgcaaatatagcttttcagcgtttggtgaatcagaagaagaaggaagacggagagttggtattctctcgtaacggtcatatcttcagagtcaaagctgttgatcttgacaagatttattaagttatagatataaatatacaaaaagaggagacgtatctttaaaagatacgtctcctttttttgtatttatagagaagtaagttaacttacttctctatcttgagaattccatctcgttcaataaataaccggctccggcatatttatcgattacgaataggacataacggatatctacgataatactgcgttgataatcgggcagatattggatatcccctcctactccttcccagttacggtcgaaattgataccgattaactctccttgtccattcaataccggactaccggagttccctcccgttgtatgggtcgtagcacagaaggcaaccggcattttaccgttaggcatcttataagggccaaagtctcctgcttgatataattccttcaaacgagcagaaaccacaaattcccaattcgtagaatcctccttctccataacgccgtctaaagtggtttgatgaccataataatcgcaatcacgaggactgtaacctttcacctgcccataagtcagacgaagcgtagagttcgcgtccggaaaactagccaagtctccatacatcgctaaaagtcctttcacatacgcacgatgggcgatcgcatatccggcatcaaaatcagccaaagccttatctaacgcctttttctcatcctttacggattgcgcgaacagaatcatcggatcttctctcaaagttttgacagacgggtgctccttgaacgcattaaagttcttctcgctaccatagatcgatttatcaaacagataatctacgaatttatccacatcccccttaaacttgctatcgattacggaaaaataagccggctgcgacttcggagcgaccaaacgcctatattcctttaacatgactttcgctatcttcttatcaaccatcggcgcataatccttatctgcgaaacggtggaaagccctctccaattgagtaacctgtttttgctgctcggaacgatctttcccctccaaagcctcacaaacagtctcgatatcggtcggaactttggagaactcgataccacggctcaatgcctcatccaacatccaactacggaaacgcaaatccttacgatcattaacgatctgctccaatgtcagaagcgcttctggataagaaggctcacacatcttcttcgaccaagcgatcaaacgattctgcacatcgtttttcacctgctcaaaattacgtttgttgatcgcccagttactaccgatcgcattcttataagcgttcgtagaacccgcatacttactagcgtattgaatccggacttgcggatctttcaacatttcttccagcatcgcctcttgacggagattacggatattaatacgtaccgcattatctatatcccgacgttcggctacctcccatgaggtatagtatttattggtacgaccggggaaacccatgatcatggcataatcgttctcctccacaccttttatagaaagctttaaccaacgcttcggacgaagcgggacattggtttccgaataaggtgccggatttccgtttgcatcggcatacacacggaaaagagagaagtctccggtatgacgaggccacatccagttatccgtatccgcaccgaacttaccgatagaggaagggggagcaccgactaaacggacatccgaatagattttcttggtaaacatatagtacttattacctccataaaaagccttgatctcgacttccgtaccggggttatcctgtaagaacttctcacctactttcgctttagcgaggccattcaagtacttagcggacaagaattccatgctgttcggatccgtgatctttttcagttccgtcctcacataatccgtcacgtcgtcgatcttatcgataaaagtaaccgtcaatcccggattcggaagctccttatcacgagacatcgcccaaaagccgtccgtcagataatcatgttccaaggtactatgccgttggatgctactataaccacaatgatgattcgtcagcaccaacccgtccggagagatcatctcgcccgtacaaccaccgccaaaacgaaccacggcgtctttcaaggaaggagcctcggcgctatacacttcctgatcgcttaatcgcagaccaagggcctgcatctccgcaaacttttgttgcttcaataaagggagcagccacatgccctcatcggccaagaccggaaacgccaatatagcggccgctacagataaaaagagtttcttcatgtatttgaactattaaaaggatgttttgtcaacattgaattataataacggcgatctccacttacctccttaccaagccaagccggtttctcaaaaggctcgtcctcagacgataactcgatctccgcaaggatcaacccttcattcgctccgtggaaaacatcgacttcccacgtatggctgcctctgggaaccagataacgaaccttgtcgatcgcacccggctcgcaaagttccaacaaccgctcggcatccaccagaggaatcttttgttcgaactcataacggctcaagcctttctcatccgaagcgcctttgatcgttaggaatccctcctctccccggatacgaatacgaaccgtacgtccgggctgtgagcaaatatatccctgcacgatacgggtggagctaacagcctccggtaagaaatcaccggagaccaagaatttccgttctatctcaatggccatgtttcgaggtatcagccttaatcgttaccatcgtcgcaccaaagccatattcgcggaaagaagcatcttgaaaataatgttgcttataacgggtcttcaaatccttctcgatcgccttacgcagtacgccatcgccttttccatggataaagacaatcttctgtccgttattaagagcgtactgatccatcacctcacggaattttcccaactggtacgtcagcatatccgcattgctcaatccattcgtattatccaacaattcggttatatgcaaatcgatctcaaggatagcgctattcgtcggcttctttttcacgatttgccggggaaccctacgttcctcacgaaccttttgctgcatagcttccttcaactccgccgcagagaccaatagttctctctcgggcaagtcattgcggataatcggataaatcaaggcatcctcctcaaagaaatcattctccataaagcagtgaagcttgtagaacttaaccgtatccaagcgcaactctacagatacggcgtttttcaacgaatagggtttatccttcttgaaagcgatcagttgcacgcagatcctttccagatcattcaactccggcttaccgaactcctctaggaatattttcgtattcggctcaataatcccgttataacgacttgtccagctattattcgttcggttcatataattgaagaacaaatagtaattgctatcattcacgaaatacgtctcatagccacattgctgaaacgccttcggatcgaccgggagataagccagatacacattcagacgctctccctccggtgtctcctcgaccttttcctctttgggttcaggcttctttggggaaggagtctctaccggagcctgtactttcgggcgattcgagctatgcacttgcatatcattgcccccaaccacgacacattccttgatcaaggcaggaacctcaaacccatcctcatcctcaaccaacacttggtcctttccacggaatccacgtacgactccacctcccacactattcaggaagcgaactttatcacctatttgaatactcatattctataccttattatattatgcgcacaaaattagggaataatccgcgaatccgaaacctatttactacttttgcactcggaatccgtacaaacggatgtttttttaacaggacagaagaagtaatgaagacacaagaaatacgtatcgaagattataactattcgttaccggacgaacgaatcgcgaagtttccattgcctaaaagggatgagtccaaacttttactctaccgtaacggggaaataagcgaaagtatctttaagcatatcacggattatcttccccaaaacagcttgatggtattcaataatacccgggtcatacaagcccgcctacttttccagaaagagaccggcgcacgcatcgagattttctgcttagagcccatcgagcctcatgattacgccttgatttttcaagagacccgacgctgtagctggacttgcttggttggcaaccttaagaaatggaaagaaggcactttatccaaaacgatcttcattaaggatcaaccggtcgtgctgacagcggataagaaaaagtctcatggtgacacacatttgatcgaattcacatgggataacgagacttatacattcgccgatatcttggatgccgccggggtcttgccgattcctccttatttacacagagaaacagagaagagcgacctacagacctatcaaacggtttattctaagataaaaggctccgtcgccgcaccgaccgccggacttcatttcacttcggaagtacttgccgatatagatgctcggggcatcgggcgggaagaagtcaccttgcatgtcggagcgggtacctttaaaccggtaaaaagcgacacgatcgaagggcacgagatgcacacggaatttatctccgtccgccgcagttccatcgaacgtatcaaaagcaaccttggaaatatcatcgccgtaggaacgacttccgtacggaccttggaaagtctctattacatgggcgtgatcctagataataaccccgaagcgacttccgaagatctcgtcgtaaaacaatggatgccttacgacatgaataacaaccggctgacagcggagcgttcccttcaaaacatcctcgattatctggataagcatgatgcggatacgctggtaacggctacacaaatcatcatcgccccgggctatgagttcaagatcgtaaaaggaatcgtcaccaacttccaccagcccaaaagcaccttgctcttgctgatctccgctttcgtaaaaggaaactggaaatccatctatgagtatgccttagagcacgatttcaggtttctaagttatggggatagttccttgttaatatagatgcatgtaaaatacgagccgaatggtgaacagttaaaatatctattcggctctcattaaccactctgtaaacaatccggtaatgattcatccggataagctctcttatagtcgtatcttgaaactccggaaccatacgcccggccaaaggaaaacgttctaaaacatctaccgccgcaaacaatccacttacaactcgggaggcatacgaggtataactcttcttctcaatataatctccaatttcattaaggttttggatcgcaaaatcagtccattttacttcaaccatttcgctaatttattccggcattccaatttggttagcacttttccttcttctgattcttttattccaatacagaccttatcgacaaaagacatcttatcgacaagctggtccatagaaaaatgctccggtaatccttccatagccatagcaacttttgacttacttaatagattcatctgaataggtttcgttttctacaaaggtaactgttttctttcaacatacaataagatcccatacaattcgttatatttgcacgatatattccagattgaatgaaagcgcattttactatatatgttttatttttgcttatcgtatcttccttgtattcctgcaaatcggcgaagttgagcgatgccgaggagaagcagcgtatcggggaatactatgaggcagccgccatttatcgtaaagtttacacgaaaacatccccgaagaaaagggatttgcgcggctatatcgcttaccgtatggccgaatgtaaccggttgatcaacaatacggcgaaagcgactagtgcctatatgaacgccatccgctatgattaccccgatagtaccgtctacctacgcatgggacagatgttacagaagaccggacgttatccggaagcgatcaagaactacgatatctatatggagaacgatcctagcaatttattagccatcaacggcatacaaggatgcgagttagctcccggatggaaaaagaaccctacccgctacgaggtaagacgcatggataaattcaattcccgccggggagaattcagtccgatgctggccggagataaatacgaccaactatacttcgcttcttcccgctcgaaagacaaagacgcaaaagttagcgccatcaccgggcaaaataacaataacctcttccttgtcaagcaagacgagaaaggggcttggctagctcccgtagagcttgaagacgaggtgaatacggaatacgacgaaggaaccccctctttctcccccgatggaaacacgatgtattatacctattgcgcccaagatccggaaggccctcgtaccgccgagatttacatatctacccgaagcagcgccaaatggggaaaaggaacccgtgcgacgatcgtaaaagactcggttaccgccctcggccatccttccatctcgccggacggcaaatacttgtatttcgtatccgacgccgtgggcggtttcggtggcaaggatattttccgtgcccgggtagcgggaaacgatttcggcccgatggagaacctaggagaagagatcaacaccccgggagacgagatgttcccgtatgtccgggattccgtcaccctttatttcgcgtccaacggacatccgggaatgggcggtctcgatctgttcaaggccacgcaagacagtacagggaagtggaatgtcgagaacctaggcgctcccatcaactctatggcagacgatttcggtatcaccttcgccggaaaagaggaacgaggcttcttctgctccaaccgcaacgacgcacggggctatgaccatatatattcctttgaacggcctacgatcaccatcttcatcgaaggaatcgtaaacgatgtcgatgaatatccgatcgaggacgctaccgtacgcatcgtcggaaaagacggactgaacgtgaaagtcccggtcaagaaagacggaacctatcgtgtcgagttggaacgggacatccgttatgtcatgatggccagcgcccgtggttacctcaaccagaattacgagttgcataccggccccgaggagaaaaacgagacgtatatcgtggatttctttctctctccgatcagcaagccggttgttatcgataacattttctacgatttcgataaagcgacccttcgtccggaatccaagaaagctttggacgagatgatcaagatgctgaacgataacccgaacgtaacgatcgaactgggtgcccacacggaccggaaaggtacggaccagtataacgagcgtttggctcaacgccgtgcgcaatcggtcgtggattacctaatagcgggaggtatcgaggcggctcgtctggaagcgaaaggatatggagaaagcgttcccaagacgatcaataagaagatggctaaacaattcgatttcttgaaagaaggcgatgtgcttaccgaggaattcatccttgccctgccgccggaacagcaagagatcgccgaccagatcaaccgcagaacggaattcaaggtcttacgtacaaactataacttattttgagggagcaaagagcgtgatctccttaaaagagaccggccaatcgatcgcactcatcagcacatcgaaggacaggcgttgctgataagagaccgaggactcccttgaatacaagtcatgagctaccaaaccgatcatcatcttaaccttataatgcaattccttggatagtaccaagcaggcaagtacactcaaatctctcgcttcttcccaatcccgatccgcaaaacacatctccttttgaagtgccggataatgacgagtccgcatgatcagatccggatcacggacctcacacgcaccttccactacatccaataatatacgacagacagccaaacgttgctttttaattacctccatatacgtttccctcaaaccggaccgttcaccttgttcggtatttctatatgctacaaaaaagaagcgtgggaactgttaatctactattcgaaactgaggcatcgccaaacacccatcggacaaataataaacaacagcccacgccttattacgtatactattaggcagtatatataacaagcgtgagcgtttagttgcctattatctctgtccgacttgaaacttggcgattttcagttccaaagataatatcttaaacgcttatcgtaatcacactttgattcataaacccttgaatttccacaagagtttactttatcgatacaaatataacgctttttctcatacatcatatggatttatttttctcttttaaaatctattgggaaaagatagcgtatactctctagcgataaattcttccactataaacaagatgcttccgtgagtaaaaaagagaagcgcatatacatactatttaatgtatatgcgcctccaccattatttggatatttccaaatccggaactttcttccttatttactctaccgagaacttataaatacactcactcgtatatttctcgcccggacgtaggatgacactcgggaaagaaggttggttcgggctatccggataatgttgagtctccagacatagggcgccacgatgtgggtaaaccacacctaacttgcctttatcacccgctttcgtcattgagttgccggcatagaattgaagacccggctcgttggtgtaaacttccataacgataccgcttgtcggagatacaactttagcggctaccttattgatatcgccggcggcgttcaagatccagttatgatcataaccaccaccgtaaaccaattgcgtaaacggattgtcgatatcagcgcctaccactaccggtttgcggagatccatcggagtgccttccacgggttcgataccggtcgggatcaaagtctcgtccaccgggttatatgtatccgcatcgatcatgatcgtatgatccatgatttgcgagccgggaacaccggaaaggttgaaataactatggtttgtcaaattcacgacagtaggtttatccgtcgtagcctcgtacttaatatcaacggcgttatcatccgtcaacttatagatcaccttgatatccagattaccggggaaacctgcctcaccgtctttcgatagataagtcaactccaaggtttggtcatcgacctgtttcgcgtcccaaactaccgcgtgatatcctttcggacctccatgcaagcaatgcccgttattattctgcggaagttgatactccgttccgtccaacgtaaacttaccattcgcgatacggttgccataacgtccgatcaaaccaccatagttattatccggaaaagctacatactgagcgatattatcatacccaagcacaacatccgtcatcttaccgttcttatcaggcaccatcacggaaaccaagcgtccaccccaattcgttacgcaagcctcagcccctttcttattcttcaacacatacaaagcagtcggcttaccatctacctcagatacaaaatccgacttcatcaaaccagaaagagtggcctcttccgtagccgcccccttctcattcttacctccgcatgacaataacatacacattgccatgaccgcaaaacaaagttttttcatctctttcctttaaaattaataaatgttattcttcgggcaaagatacgcattctatccacatgaggtccaatatccttacgcattttctcgggaatccttaccgatttcctcccgaagtactacactcttcctcttgacatcttaatcatccaccaattggtagatgatcatgcaacagccgttggaagatcatgcaacagttggtagatgatcgtccaacagctgataaataagctagaccttcatacaaatcccctaatacctcccgaagaaaccgccaaggatacatgaagaaaccgtttgaatcctcaaccgatttcatattttgacccgttattctagtataatacgattcacttttgtacatttgcacactattgtaataagtgagtaatgaaacaatatttagagctgctcaatagagtgcttaccgagggagttagaaaagaagaccggacgggtacgggaacgatcagcgtattcggtcatcagatgcggttcaatctggaagagggattcccgctactcactaccaagaagctgcatctgaagtctatcatctacgaattgttatggttcctgaatggagataccaacgtaaaatatctgcaagatcatggcgtacgcatctggaacgagtgggccgacgcggatggtagccttgggcatatatacggttaccaatggcggtcatggccggattataaaggaggatctatcgaccagatcaccgaggccgtggagacgatcaagcataacccggattcacgacgaatcattgtaagcgcatggaacgtggcggacttagacaacatgaacctgcctccttgccacgctttcttccagttttacgtggcgaacggacggttgagcctacaattgtatcaacgtagcgcggatattttccttggcgttccgttcaacattgcctcctatgccttgttattacaaatgatggcacaagctaccggccttaaagcgggagattttgttcatacgttgggagacgcccatatctacagcaaccatttggagcaagttaagttacaattgacacgtgagccacgtgcgttgccccgtatggagatcaacccggacgtaaagagcatcttcgattttaagttcgaggatttcaatttgaccggatacgacccacatccccacatcaagggagaagtggccgtctgagaattggcagttgacgatggacagttgacagttaattcataaatcataaattacaaatcataaatcaataagtctatgagtacaatttctatcatcgcagcaatcgcagataaaagcgcgatcggaaagaatcagcaattattatgtcacatgccttcagacatgaagcgtttcaaggaattaaccacgggacatgcggtaatcatgggacgtaagacattcgagtctctccctgtagcgccactgcccaatcggaagaatgtcgtattgacgactatgcccgaagctggtttcgtgaattgtttcgcttgcgagtctatgggggccgctctggatttatgtgagaaagaggacgagatattcatcattggcggcgcgttggtctacagacaggctttgagaatagccgacaaaatgtatattacccgcatccatcatgagtttcccgacgctacctcgttctttcccgtcgtaaactgggacctttgggaagagactgaacgtgaggagtatcccgcagacgagaagaacccttacccctacacctacatcacctacgtgcgcaaaaaataaacattaacgtacgttttacaactttttgctctttctttgtatctatataggaaaggtttattgttaaacttataaaacccaaaagatatgaagataagagcaattattttatctgccctgatactttgcggcatctcggcggttattatgtatagccgggccgcccagcctcaacaaaaaagttctgttatcacgcaagctataaacgataagaatacccctatggtgatcaagaatcttatccttaaaatgaaagaacagatggaggtaaacgatgatcagttcccggaactgatcaaggaggtggagaattacaccaacagttgcgccgactcggcttccgtggcggtattacattccatgctggcggagatgtatcagaattactaccaacggaaccagtggaccatcaaccaaagaacccaattaagcggttatatcccggaggatatccgggtatggacttccaacttattcacggataagatcaaggaagagatcgatttatcattgcgacctacggccttattgcaaaatacgcctgtcagcaagttcaaggatattctggagatcggaaaggactcgcaaaccctgcgtccgaccctctatgagttccttgccttccgggcactggacatccaaccgaccgtacagatctataaagacttgatcgcctttcaaaataaggagccgaatatgaaatcggtcctccttacggaattggattacctacgattcctttacggggataaaagggataaagagtcttttgaggcttacatgaacgcattggatgagctttacaggaacttagcttctcaaaactatgcagccgagatcttaatcgccaaattggatttggttagcggcagtatgtttcgttacgtctctacccaatgggattctatcaaagcggaagaggtgaaactatgcgaggagggtatcaagcggtattccggttaccctcgcacggctatcttaaagaatcgcttggcgcaattggaacaacctactttatccgcatctacaaacaatacggtttatccgggacagcaactggggatcaagctggaatataagaatgtacagaaagtcatcgtacaaatctatcgaagctcgaaaacacctttacaagcggcagcccatacatccgcaaaaaaatcaagtggcagcaccttgggacaactcgtaaatgagaagacattctctttgctactgcccaacacctattcgcagcaagatacgaccttacatatatctatggatcaaccgggattgtatgaatgtgtcgtaaccgtacccggacaacagctaaagacgatcaatacggttagcgtaacccgattggccgcgatctatcgtaatctttccggtaataaacaagaggtcatggttaccgactatcttagcgggaagcctgttgatggggctatcgttacctattacggaggtcagcgtcgtagcttgcaagaactgggtaccgtcaagacagaccgggaaggcttggccacgcttccggcgaacagtcaagtattggcgttccaagccagcagaccgggagataccaacgctatgttgacaaatatctacccgatgggttccggccacaaaccggaaaagaacccggtagaagtctcgatctttacggaccgtggactttaccgtccgggacaaaccattttcttcaaaggtctcgcctacgtaaaagactcgaacgacccgcatgccgtggccggacagacttttacggtgactttgtatgacgctaacgggaaagagctagcccagaagaaattcacgactaatgacttcggttcttttaacggcgagttctccatccccaaacagaccctaagcggcgtcttccggttaagtaccggacagatgagcgtatatattcatgtagaggaatacaaacgcccgactttccaagcgtacttcctcccgatcaagggcgatatcgctttcggcgattccgttaccatacaaggcaaggcggctacattttccggcgtgtcgctacccagcggagatgtcacttggcgtattacacgcaggcccttcctgttgtggaggtatttccgtccgagcgctccgacacaagttgcggaagggagtaccaccctttccggcgatggaacattcaacgtatctttccgtccccaaaaagaggaggatacgaatccatacgcttccgcataccagacctacgaggtatcggctaccgtaaccgatagcaagggagagacccaagaggcaaattacaccttctcggtaggagaatccagtatcgtcttattcacgaacctaccgccacaaatcgagaaagactcggtaaaagccgtagtcgaagcccggacaatcaatggggagatggtttccacctccggtactttcaagatcgtagaactgatcgcgaaccgatccgataagaatagcggagagagcgatcaagaaggcaagcaagtagcttccggtagctttaccagtggcaaggagatcagtccggctattttcaacccattgccctccggacgttatcgcattttagtagaagccaaagatagccaaggacgacccagtaaaaaccagtccgatttcatcctatacggaaagaacgacaagcgtcctcccgtatttacccatacttggctgctgaaagagaagacaacttgtttacccggggaggaagcggaaatcgtattcggcacctccgacaaggacgcctacgtactctatgaatggtttgccggaaataaccgcatccatcacgagttgataaagctaagcgacgcgaaccatcggtttaagatcccgttcaagccgaaatatggagagggaatcatcgtatcctttacgttcgtaaaagagggtgagctatatattacccaagtacccgtagagcttcagctacccaaccggcagttgaccatcaagccgataaccttccgggatcgtttacttccgggaagtaaagagagctggaaattccgtatcaccgacgcggactccacgatcgtatccgccgaggtactgaccagcatgtatgatgcctcgctagataaaatcataccattcaattggtatttctccccgcggcgaacgatcctgctacaagctccccgtttctcaaccggagccggattccagcgtagttatcaatatggccagacagaggccaagtatataaaagtacctcaatatcagtatgaccgtttaaattggttcggtctattcaatgagattgtcatacgaggatacggctccagcaaccgggctttcgccacgggtggtatcatgctgaaatccgcggcagccccagtagtggcggaatccatgaacatcatggaagacagcgccgtgttagaagagcctagtgtggaatctacggaaggggaacccgtgttcagcctatccgatcctttcgccaaagagagcagcctgccggtaagtccagagcaaacccggcggaacttcgcggaaaccgccttcttctacccgatcttacaaacgaacgaggaaggagacatattcgtaaatttcaccctgccggaaagtaatacgacttggaaactacagctattggccaacaccaaagacctaaaatacggtctgcttacgaaagaggtcattagcagcaaacccttgatggttctaccgaatctgcctcgtttcgtccgccaaggggatgaggtcagcatcagcacgcaagtcatcaacaattccaaggaagcggtatccggccgtgtacgcatcgaactattcgatcccgctacagaccaaccgattatctgcttgagcaagtcacaacgtccgtttgagttgcaaccggatagcatcgctactgtaagctggatgatcccagtccccaaacagatcaacctactgggcgtacgtatcctagccgactctgaaaagggaagcgacggggagcagcagatcgtacctgttctttccaatcaattgctcatcacggaaagtaccccgttctatttgctcaaggaaggagagaaacaaatccgtatctccgggaactcggagggagcgacaccattccgtctcacgctggagatgaccgggaatccgatttggtacgcggtacaggcattaccgacgatcacacagccgaacaatgataatatcttatcttggtttgccgcttattacagcaatacgttggcttcctatatcgcccaagcccatccccgcatccagaaagtgatcaaccaatggaccgcccaaggagggaatgcctctaccctctattcaaacttggaaaagaaccaagagctgaagaacatactcttggaggagacgccttgggtactagccgccgataacgagacagagcaaaaacaacgcttgtctttattgttcgacctaaaccgtgcggacggattacgggaaacggccttgcaacaactgatccaacaacagaacgaagagggtggatggagctggttcaaaggtttccctgcaagccgtgcgatcactctttctatcctgaaaggtatgtcacagcttgtacagctaaacgcgatccaatatgggcaagcggagaaagagatgcaaatgaaggccctcaagttcttggacaaaagtatgcaaacggattatgagaacttgctgaaatacgataagaaatggcaaaacgcatggccctcgccggagcaggtagagttcttattcgtccgcagttcctaccgggatatcccggaactgggagacgcccgggaagcgatccgtttctatacgaaccaagcggagaagcactggaatcaatattccttaatcagtaagggcgaaatcgccttgttaatgcatcgaaacggtaaaaaggaggtggcgacagcgatcctgacatggctaaagaagaccgctacgatctccgaggagaaaggtatgtattgggcaaacaaccgcagggggagtgattatttcacctcaccgatcgacacgcattgcttattaatgtccgtctttaacgagatcgcgccggatacccagaatacaaaccggatgaaacaatggttgctaaaccagaaacgtacacaaaactgggaatccgtacccgccacggtaaacgccatttacgccttgctactcacgggtagcgattggctgaacacgcaaaacacctgtgtagcgacatgggacggcaagacctatagtaccgcggaaggggaaatcgccaccggttacctcaaaacgatacttccgaacgagccggcaaataattccgccaaccccgtgctctcgatccgcaaggaaggaaacacgccggcatggggagctgtttacgagcaatacttccaagagatcgacaaggtaaaaggacaaaaaggggtgttgagtgtcgagaagaaattattcgtcgagaccaataacggtaccaaccgccaaatccgtcccgtaacaccggagcaaccgctccgcatcggagacaaggtaatcgttcggctaacgatccggacagaccgtgaaatgaattacgtattcttgaaagatctacgtgcgggctgcttcgaaccggccgatcaactttccggcccggaatcaagagacggtatctggtattacagatccccgaaagacgtatccgagaatttcttcatcaatcgtctgccggaaggtacgttcgtcttggaatatccggtctacgtatcccgtagcggcgaatacgccggaggtatcagtacgattcaatgtatgtacgccccggaattcgtgtcgcacaccgccggagaaagcttgcggatcatgccctaaacaagccttttcttacaatgcccgttctaacctccttacaatgcccagtataaggaggttagaatgggcaccgtaagaaggtaagaataggcatcgcaagaagcgttatcttcctctaattttcagttttcaattctcaactttcaattgaaatgactatctttgtaattcgaattaaaactaaacgataagatgaaacaaatagtttttattttcatggcgatcctgttagcgacaggaatggcttcggctcagaagaaagcagttatttccgcggaaacaaccagtttcgacttcggtaccatcaaggaagcagacggaaaagtatcccatacgtttgaagtatccaatacgggcgatatgcctctggtcattacacgtgtaatcgcgtcttgcggatgtacgaccccggaatggccgaaagaaccggtagctccgggtaagaaagcccagatcaaggttactttcgatccggcaggacgtccgggtcctttcacgaagaccatttccgtatacagtaacggaaaaaccggaagcttcatcatgaacatccggggagaggttgaataagaaatacgtaaaaaaaccccaattggaatgctgaatataaaaaggttgatccttgctcttacagcaattatatctataacgacagcttgggcacaacaaggcgcccaaatcttgtcggacgagttgacttataatttcgggacaatagccgaggccgatggattcgccagtcatactttcacgataaagaatacgggagacgcccctttggtcatcacccgtgttaccgcgtcatgcggttgtacacggccggaatggactaagtcgccgatcgctcccggtaagaccggtgaagttaagataacgtataatccgaaaggacgccccggcccgttttataaaaccgtatcgatattcagcaatgggaagaaagggagttacagcctagccattaagggaaatgtcaccccgaaaccttcgcagccggtctttacgtatccttattctatcggtgatctgaagctgcatacgaagactgttctattcagcagtatccgtccggaggaaacgttgggcgagaagatcaacattaagaacgagggaaagacctcggctacgattcatctgggtaaagtacctcactaccttaacgtacaggtgaacccggctacccttcaaccggacgaggtcggtgccattacgatccttatggatgccaaggtcctgaagcggaaaggacgagtctctacgcttttgccgatcatgatacagagcgccggaaagaaggaagtatccggagagatccagatctccgccaacgtgatcgataatttcagcaaactatccgctgcggataaagcccaagccccgatagcggaattatccggcactttactggaattcggcaagctaccgaacaagaaaagtatcgttccgttgatcggtggtaaggtatcgggtacgtttgagattacgaatgccggaaagactccgctcacgatctacagcgtcacttgtgatgatgagcgtgtcgatttgtccggcggcaagaaagaacttaaaccgggagcgaccgctactttcaaagtaaccttgcgaccgaaagagataaagacaaaacttgaagcacttattaatgtcgtatgcaacgacccgaacgggcctatccgcttgatcaaggtgacggcatacaaataatagattgatatggaacatccagaaaacgatgatcagtacaagggattgaaagtgaataagggcattgcggatgtccctaccgtaaatccttatataaaaaagcgtgtccaacgcaaggtatatacgccttccgaattcgtggaaggtatcttaaaagggaatatcacgatactcagtcaagcagttaccttggtggaaagctccaagcatgagcaccaacaggtggcgcaggagattatcgagaaatgtttgcctttcgccgggaaatcggttcgtatcggtattacgggtgttcccggagcgggaaagagtacctctatcgactctttcggtatgcacttgatcaaccaagggcgtaagcttgccgtactagcgatcgacccgagtagcgaacgctcgaaaggtagtatcctaggagataagactcgtatggaggccttgtcgagagagaaaaacgcctttatccgtccttcaccatccgcaggctccttagggggggtcgcccgtaagacccgtgagacgatcgtattatgcgaggccgccggtttcgataccgtattcgtagagaccgtgggtgtcggacaaagcgagacggccgtacattcgatggtggacttcttcctgttgattcaattggccggtaccggagatgagttgcagggtatcaaacgaggtatcatggaaatggcggacggtattattatcaataaggcggatggagacaatatcgataaggcgaatctcgccgccgctcaattccggaacgccttacatcttttcccaccttcggaatcgggctggttcccgaaagtattgacttattccggctattacaacctaggtatcaaagaaatatgggatatggtcggagagtacatggagttcaccaaaaagaacggctacttcgattacaaacgtaacgagcaagctaaatactggatgtacgaaagcatcaacgacacgttgcgggataagttctatcataacccggcggtagaaggcatgctggaacaaacggagaagcaagtcttgaacaacgagatcagctctttcgtggcagccaaacggatgatcgatctgttcttggataatatcgctacgaaataggtataaaaacataagagtgtcgcacgatctgatcatgctacactcttttttacttgaaccttacatcgactcctttgtcttctttcgctttcacggccaacgcacgcccttgtctctttacctctcctgtgatgaattcaggtatattgtaggatttcataaaacgaaaataaaaatccgtatccttctgaggtaacaggaaaggtttgcaagcctgtcctttcccatcaatataagcgatgaacggccttgtatacaaaccatccatccgccggctgctaaacacgatccaacggctatcgctactccatgaatgatagctttccacatcgtcgctattcgccgcctccaatggataactttgcagagtcgataaatcaatcatatacaaatcggcatccttatgccaaatagagaaattcccataaccggacaaggtatagagcaaatattttccatccggggaaacccggggaaaagaaacgcttttatcgatctccgatgccttatataaagtatcgactaccgtcccgaaacggcgtgtagcgggatcgaacgagactgagcatagatcatatctcacttgatcgtattccttgggcatcgtacgggctttagccgaacagaaatagagcgtatttccatccggggaaaatgtagggaaagtctcgaacgctccctctgaagacagcagcggagaagtcacgatctcatgcttttgggtatcatagacgaccacatccgaggccgagtcgaatacctccacccgattcctatcgttcatatgaaacgcttgcttggttttattcacagagaaagcgacatattttccggaaggatgccaagaaggatagaccagtggagaaagggtctgatcggtcttcgtattcagcttctccaccctatctccatcgatcaataaggtacaagagtaggtctcacgcatatggaaaagcattttctccggattctgcatacagaaagaatggcagttcatacagttattgccgctcatcttattttcgatgatcgcgttctccgtataattttccaagttacgttgatagatacccatacggttccacaactcatagcccggttcgattaaacgataagccaaccaaccatcgaccggctccttcgccaccttgatggtgaatggggcatacgcgatccattcatcattcacgaaggcttgtacggttacattcagatgattcccggaagcggtacgcaacagccttttccaaccggaggccgggatcacgaaacaagcgtctttcccggtcttgatctctaatttctccgggccacattcgagaatggcacgggcctcagcgcaagcgtctttcagcttaaaattcaagggagctatattcggcgggattgtcacatccgcataatccggaaagatctccggcttgacttccagattcttctgtatacgtaccggaccggaacaagccatcaagcccagaatcatccacagacatatacatcttattatatacatttttctcatctcctatttaaacatataataataccaatacgtatcgccataagagcgatacatcaaaccgggcagcgcattactattattccgcccagcgagcacttgcctcttataatcggtgaatcgccctacgatagattccgagacaccgaaacgtttccagtaatccggatctttctccgataggatgatgaccgcctcttgaaaagagaccggtaaagaagggagtaaatccgttccgtaataggtttccaccaacgtcttaaagcgcgtcacatcttttgctaaaagatagaacacgccggcatagtggaaagcggctttattggaaggattctgctccgccaagcgaatcaagtccgtgtcgaatccatccatctggatcagataattctcagctagcaggttcctccgcatattccccaatagaggatctgtctcgaccgcctcatcattatacaggaatttccgctgcgctttggcccaatccttataatagaaagtattctctaagacagcgatatatttctccgcaaccggataggctccataaatcaagttcgtttgcaccaaacgttgcgtcatgcggggatttccatcacataaagcaccgatattactctcgaatgccatctcttgagccgcagcgacatttcccatcgtaaaataaacatcactcaacaaggcggatatggtggtcgatttattccatgccaccattaatccacgaggcccgtgctgcgtgtacttaaacgcctcatccgccagaatacctttccgggccaaagccatattttggtaacataaatagagttgattagtggtcggctccttgcatgataccaagatccggtcccattgctctgtccgggtaaaatagtccatcatcttcaaacggtatgatttctgttcgccatatagatcgaagcctttccagaagataagccctaagataatgaattgggagattcccagcgctagacgctttttaccagcccatgattccttgtttttacagaggcaggttacaaccaacgccgcatagaaagcgatccatgagaaataaattaccttatccggcaccaaacggaaataataataactatccggtaaaaagacaaagcggtattctccgatcaccgagtaacgcacacataatccacccaagatcaacacgatcatcggtaaaatcgcagaataataccaacggggcgtccggctcatggcctcatatccgaccatggataaggcaaacaacaaagagaccggcccggccaacccaaagagtaacagggaggcaaacagacttgctatcaaacgaggtatgaaattccttatccctaaaacgagatataaagcaagcagcatcataccgaaggcgaccgttccttgaaacctgtaattaaaatcccattgcacaaacaacaaggataggacgggaagccaagcccataaaataccatggcttcgcggatcgatccgcttcaagatcgcccagaacaaggcccctaggcttgtcagcagggccgccgttatcatagctcccacattcgggagaatgaagaactgcaccaaacaaccggagagaaccatcgctaaacctcccggttgcattaacttatcgataataaaaatgggagtcaactggaataactggttctgctcgacacagtaaaaatggtactcactgaatatcctcaagaagataaacagaaagacaaatacgattacatgcaaggccacgccgctatacttcttcatgatatcaggttcttcaaataaaaacccggatgtacgcaatcgctacatccgggttcctattcgtataaacatatgccttatttagattgaagaaacacggagcgtgttcaacaaatcccggttaataggcttatcattcttgatcgctttagagaacggtacatagacgatctggtcgttctggatacccatcatcacgttacgctggtcatccaacaaggcatcgatcgcggccacacccatacgagtcgccaagatccggtcttgtgccgtaggagaaccaccacgctgcaagtgacctaaaatagagacacgcacgtcgaactgcggatattccttcttcacacgctcagcgacacccatagcgccaccggttacctcactttcggcaaccaatacgatactactgttcttggacttacggaatccattctcgatcatctcggccaattggtctttctccaaggagatttccgggataatagcggcttcggcgccagaagcgatcgctccgttcaacgccaagaaaccggcgtcgcgtcccataacctccacaaaaaatagacgatcatgcgaagtagccgtatcacggatcttatccacgcattccatgatcgtgttcaaggctgtatcataaccgatcgtcgtatccgtgccatacaagtcattatcaatcgtacccggcaatcctacgatcgggaaattaaactcctgagcgaaaatacgcgctcccgtcaacgttccgtcaccaccgatagcgatcaaggcatcgatcccatgctcttgcaacttatcataagcctgttttcgtccctcgggagtcttgaactccacgcaacgggcggtcttaaggattgttccaccgcgttgaattatattactgacattttgtgtcttaaactcttcaatctcatctaagatcaaccctttgtaaccacggtaaatacctttcactctcattccgttataaatagcggaacgtgttaccgcacgaatagcggcattcattcccggggcatcacctccggacgttaaaataccaacacactttactgtagacatagcgtcattgattttaatgttctccggcaaaagtagtaaatatttagttatccttctgtctttctcccggaaagttcacgtaatcttaatcaaaatatcattccgaagcattcagttccttgatccggaccgccacttcctccatcaaccacttgggagtggatgtagcgccgcaaaccccgacccggcgcacgccctcgggcaaaggctcggtaatctctgatacctcggaaataaaaagcgtattcgggttcgctttccggcactcctcgaacagcatctttccattggaacttttacgaccggccacaaaatagacccaatcgtggctggaggcgaacgcttttatattcggaagacgattcgccacctgacggcaaatcgtatcgtaataattaaactccaccccttccgtcatccgctgcttgatctccgccactaccgccttgaatccatccaaggacttcgtggtttgggaaaacagactgatcgcacgggtaaagtccagacgatcgaggtcttctattttctcgataacaatcgccgtgccttctgtctggcccaccaagccattcacctccgcatggcctttctttccatagataaccagctgggtgttatttgcccgagtctcttgataacatttatggatcttgcgctgcaaacgcaagacaaccgggcaagtagcatctataatcgtgatattgtttcgcttcgctaaagaataggtagaaggtggctcgccatgcgcccggagcaacaccttccggtctctcaactttgaaaggccatcatgatcgatcgtatgcagccccatatgctccaaccgctccacctccaaactgttatgaacgatatcgcctaggcaatacagcgtatccgtattacccagctcccgctccgcgctttctatggcggtgacaaccccaaagcagaatccggaatctttatctatctcgacttctatcatatctataatatcattaacaagcaagcacttacagttttcttaattttcaatcacaagaaactaaagtttcttcacaacaaaactagagttttctcggtgtgaaacttttgtttcctagtaacgaaactatagttttcattccaagagacaaaagttttctttataggaaactccaagcactcgtttatgaaccgatcgctttatgatattgttccagcaaccaagccttttgctcttccaaggtcatatgggaattatccaataccaaggcatcatcagcttgtctcaaaggactttcctcccgggttgaatctatataatcccgcttcttcacattctccagcacttcctcgtaagaagcggggatccctttcgcctccagctcatcgacccggcgcttggcacgtacctccggcgaggccgtcacgaaaagcttcaactccgcatccgggaatacgaccgtaccgatatcacggccatccatcacgatgcctttcgcctttcccatctcttgttgcttagcgaccaacgcacggcgcacaaagcctagagtggctaccggactcactttatccgccacttccatgccacgaatctctttctctacattcacaccgttcaaataggtatctggccggccggtctccgcattcaaacgaaatgaaatatcgatatcatggatagaagccttcagctcttcctccttaatcttctctccctcaaaaaatccatgctggatgcaatacaaagtcacggcccgatacatggcacccgtatcgatatacgtatatccgatctccttggcaagatcttttgccatggtacttttgccactggaagagtggccgtctatagcgataactattttcttcatatatatattaatgtataggtttattctgtcaccttcttaaaatcggccaaggtcgtagatacgctaatcatcatcgacatggcggacggatgatatttcgccagcgagaagcccacgtcaaacatcttgatccttacgcctgcgccagccgagaaaccggagaaacttcccccgcctttcaacttcatatccatattgaccttcggattgaatcctacacccacccaaaagttctcggacgggataaaatccacgccgatgataaaatgcttcgccaacgtcttaacgaaagaatccccgtcatactctttatccgtattatcgatataatcgaacttccaacggttcaagtattgggccgtcaaagaaaaacgaatcggggcatgcgccattttctgcgtgatacccatctggatatcccaaggcatcttttgtcgctcatcctcgtaagctttcagttgcgcgccgatattcttcaaggcgaaaccaaaggaaaagcccttatccgaattataataactcaatcccgcatccacgcataaaccgatagaggtataatcagccagccccgaatacaagaacttcaacgacaatccaccccgccaacgctcgctcaagtcgcgggagtagaaaccattcacgctgatatctttcgccgacaggctcgccccggtcacgacattatccggcaacacctcctggatatcgccatagcttataaacgtagcgcctacaccccaagcccctttctcgccatgcgctttcgtgaacaaggcacttcctacgttgatatccgagatgtaattcatataattcaagttgatcatcccatccatctccgcgcctagcaacgccggattatggaaaataagtgaaggatctctttctaccaacgccacggtatgcccacccaaggcgttagcccgggtcgaggtaggaaaacgtaagaaagtatacgcctcgctcccgttttgcgctgagacagacagtgtaacaacgaataaaatcagtataaatagtttatttctcatattttcatgcaaaaaatcgttcaaagatacattaattcggaaaaatgtttttactttacacccgcaaatctcagaaatacggatttcacattaacagaaacgggaaaaatgccaaaaaggtatataatcgctctcatttttgtttgatatatgaaataatttgtatttttgcagaagtgaaaaacacttataaattattataaacgtatggaaattaaaaaatcaccgaaagcggaccttgagagaggtaagtctctaagtatcctgatgggattcgtagtgggcttagctgtcttgttcgtgggcttcgaatggagcacccgcgatgtaatggtcgttcaggctagcgagggtgtagcagacatcatcgccgaggaagaagtggaaatcacgagaccggagaatacgcctcctccacctccaccacctccagcaccagttgtaaccgaggttttgaacgttgttgaagatgacgttgaattggaacagcaagatatcttatcatcagaggataatcagcaagaggctcaaacagccgtttatacaccgcctgcagtagtagaggaagaggaagaatccgctcagcagatctttacggttgtagaggaaatgccgaagttcccgggtggagacgcagagttgctgaagtttatcgctaaatcaatcaagtatccggtaatcgcacaggaaaacggtatccaaggtcgtgtaatctgcgcattcgtggttaaccgagacggatcagtagtagacgctgaggtattacgtggtgtagacccatcattggataaagaggctcttcgtgtgatcggtaccatgcctaaatggactccgggtaagcagagaggtaaaccagtacgtgttaagtatactgtgcctatcacgttcagattgcaatagtataacattaaacatatcaaaaaggctgctttattttcgcagcctttttttatttcataactccattaattgatacagctatgttagcattcgagaatatacttcaaagaatagaaagcgagatctctcaactacaattcaccaatcctcccaagagcttatacgagccgatagagtacatcttgtccctcggaggaaaaagaatacgtccggcgttaacgttgatggcatgtaatatatataataatagtatagagaatgcgatcaagcccgctttaggtctggaagttttccataacttcaccttgctgcacgacgacctgatggatgaagctgataaaagaaggaacaaacctaccgtacacaaggtatggaatgccaatacggcaattctttccggagacgcgatgctaatagcggcttatcaattaatcggatcaacggaacacggccacctcaaacaagtgttggatttatttacgcaaaccgcggcggaaatatgtggcggccaacaattcgacatggaattcgagtctcgcatggatgtaagcgaggaagaatacatcgagatgatccggctaaagacagccgtactactggcctgctcccttaagacgggtgccctactcggaggtgcctcacaggaagacgcaagcaacttatatgcgtttggtatcaatataggtctagcgtttcaactgcaagatgatttactagatgtatatggtgacaccgccactttcgggaaaaacattggcggcgatatcctttgcaacaagaaaacattcttattgatcaacgctctcagactggccaataaagaacaagtggaaactctccgtagctggatggataaaaaagaattcgacccggctcaaaagatacaggcattcacctctatctataacgaattgcagctaaaacaattaacagaaaataaaatccaagcctattacgacgcatccgtagagaacttaaacgctttacaagtcgctcccgaaaaattaacgatcctaaaagaggtttgtgatcatttaatgcatagacaatcctaatccatgaggttaatagacacacattgccatttatatctggaggatttcgatccggagcaagacgaactggctcaaaaagcaaaagactcaggtatcgacaccctgcttctgccaaacgtagacctgacgacgattgacagaatgcacgatttatgcgatcgatacccagagttcgctttccccatgatgggattgcatccgaccagtgtggatagcaactatatcgatatcctaaaacaaacggaatcctacctatctaaacgtacctattgcggtatcggtgaaatcgggatcgatctatattgggataagacttatttgaaggagcaacaaatcgttttcgaggaacaactgcgttggagcatcgatctgaacctgcccgtagccatccatacccgcgacgcatatccggaagttctggaatgcatacataaagtcggagcggaaagacttaagggcgtatttcatagttttaccggcacaacggaagagctggaagaaataaagaaactgcccaccttcaagatcgggataaacggagttgttacctttaaaaattcaaaactgtccgaagtcattcggcaaacggatcttaaaaagatactcttggaaacagatgcaccctatctttcaccagtcccctacagaggtagacggaatgagcctacttacatatggaagacggccgagaaagtggcggaaacattcggcctcacgctagaggaaaccgtaaacgctactcgaaaaaacacattagaattgtttaaaagcgtaaataaacccatatagacactttttttcgaatgaagtcaaaatttatttcgtggatattgtgtatatgtcaagcaaaaactatagatttgtgcactgaaaagattgcatatgggaattttttcgtattttgcggtcgttttagaagaagctaggcgaataattggagagatgctcgagtggttgaagaggcacgcctggaaagcgtgtaaacccctaaagggtttcgcgggttcgaatcccgctctctccgcggtggagaataccatgaattaattaacaataaaataaaaacaaataagagaattattaatcttaaaaattaaacacacaatgaaaaagttatttgcaaaagcattcttgggtttatgtgcccttggaacttctaccgtagcattcgcgcaggacgctgcagacgcagctacagctgttgaaggaggtatgtatcaagcattaaaaacaaagtttatcgaaggtggtgccgacttcatgagtttggttgctatcgctttgattttcggtttggctttctgcttagagagaattatctacttgaacttagctgaaacgaattccagcaaattgttgaagggtatcgaagatgctttagacaaaggtgatgttgaaggcgctaaagctatcgctcgtgacacaagaggccctatcgcttctatcgcttaccaaggattgatgagaattgaccaaggtatcgacgttgtagaaaaatctatcgtttcttatggtggtgttcaaggaggtcttttggaaaagaatatgtcttggatcacattgtttatcgcaatggctccgtctttaggattcttgggtactgtagtaggtatgatcatggcgttcgataaaatcgagcaagttggtgatatcagcccgacggttgtagcaggtggtatgaaagtggccttgattactactgtaggtggtttgatcgttgctttgatccttcaggtattctataactatttgttaagcaaattggaggctatcttgaatcaaatggaagatgcttctatctctttgcttgacttggttatcaaatacaacgtcaaattcaaaaaataataacgaattatggcagttactaaaataagaaaaatatccagttggactttactgataagttctattatcagtattattgttctgggtatgttttatgcgggtggagtcgttgaccctgccgctgaaatgaaagagcccatctataccgggttattgattaactggacttcagtattgttcttcgtgacaatcatcagtacaatgttgtttgccgtttggcaatttttgacgttgttgaagacaaacgctaaatcagcgattatgtctttggttgtattggtttgcttcgttgccgttttgttcatcacttacacgatgggtgacgcaactcctttaacaggtttgaacgcagactctcaagtttacaacactccgggttggttaaagatcacagatatgtggatcatgtctacaatcgtacttttggttctgatcgtagcatgtgtagtttggggttctgtaaagagaatcatgggtaaataatagtaataacgaactgataaaacaagaaagaaatgggtaagaaaagaaagacaccgggtatcaatggttcttcttcggccgatatcgctttcatgttgcttatcttcttccttattactacatcaatggatacagataaaggtttggcaagacgtttgccgccccctgtacctaaagatcagaagaacgataccgatgttgacatcaaaaagagaaacttgttggttgtattgatcaacagtaataaccagattctctgcggtgatcaatttgtcgatatcaagcaattgaaagaaagaatcaaagagttcattgataatccttataatgacgaacataagcctgagcgtgtagaggctgatgttccattcttcggaaagatgatggtaacgaagaaccacgtaatttctttacagaatgaccgtggtactgaataccaagcttatatcgatgtgcagaatgaaattgcggctgcttataacgaattgagaaataaggtttctaaggaaaaattcggtaagaatttcgctgatttggacgaagaacaacaaaaagctgtacagcagatttatccgcaaaagatatcagaagctgaacctaaaaattatggaggtaaaaagtaatgggaaagtttagtaaagcgggcggtcgtgaaatgcccgaattgaatacatcatcattacctgacttggtgttcgctttcttgttcttcatcatgatggtaacatctatgcgtgaggtaacattgaaagtagagttccatgctccacaagctacagagcttcaaaaattggagaagaaatctttggtaacatttatctatgtcggtaagccgactagagatttgagagcgaagatgggttctgaaactcgtatccaattaaatgacgcttttgcggaaacttcggaaattcaggattatatcgcacaggaaaagtccagtatgaaggaagaggaccagccgtttatgacggtttctatcaaggctgataaagagaccaagatgggaacgattacagacatcaagcaggctcttcgtgaagcatacgcattaaagattagttattctgccgctcaacgtgtcgacgaataatgatctacaaatagaatatctaaaaaaggcgggaaatagaatcccgccttttttatttcactccatagacattttggtgaataatggtcttaactcgcttaaaagatcgctccagatcaagttccccatgagtcatcaaacgcatttctaataacgcctctcctctacgatatggaggttggaaatatacatggtgatccaagacaaaccccagacgttcataaaaaccgattctacgtttactcatctcctctgtcggcatctctacctctaagacaaccggatcttcgtggagagctaaaaaacttgtcattgctttcgctccgattcctccgttacgagcggactcgtcgatcgcgaaatgctccgcataaacaaagccctcaaattgccatcccgtaatgaaacccacataaataccatcccgtagcaaggcatacatctcgaaacggctatcttcctccaaaagcttacgtaccaaaaagaaatcacgacgctcttcctcggggaaagaactagtatatgttttctctactagatccaataaaggatcggctatctcccggacaggcttactaattattacatgatcttcgctcataaaaaaaatacttaataattgaataaagaatgcttacaaaatcaaaataatctaacataatctttaggtgattataagattatcattatatttgtattaaatatgaaagatataatctaacagtaatacaaatatactgaatatatggcacatcatcaactagatgaactggacgagaagatacttaaactaatcatcggcaatgcgcgtatgccatttttggaagtagcgagggaatgtaacgtatccggagcggctattcatcaacgcatacaaaagctgactaatttaggggttatcaaaggctcagaattcatcgtggataacacaaaagttgggtatgaaacttgcgcatatatggggttattcctaaagtctcccggacaatttccaagcgttacagaagcgctgttgcagataccggaagtcgtggaatgccattatacaacggggcaatacgacctgtttataaaaatatacgcaaagaacaaccagcatttgctaagcatcatccacaacaagcttcaaccattgggcttggctcgcaccgaatcgctcatatcctttaaggaggcattcaaaagacaaattcctattgatctggacgacgattaataaaggaagctaatataagaaaagggtccgtaattcggttgaaaccggttacgggccctttttatcatgatcactaagcgctattagaactcagcattattcggtgtacgcgggaaaggtatcacgtcacgtatatttgccatgcctgtaacaaacagcaaaagacgctcaaagcccaaaccgaaaccagagtgaggcaccgtaccaaaacggcgagtatctaagtaccaccacatatccttcatcgggatgcccaactcatcaatacgagtcattagcttatcatagtcggcctcacgctcggaaccgccgatgatctctccgatcttcgggaacaatacgtccatggcacgcaccgtctttccatcctcgttttgcttcatatagaaagccttgatctctttcgggtaatccgttaaaattaccggacgtttgaagtgatcctccaccaagaaacgttcatgctcagaagccaagtctacaccccaataaacagggaactcaaatttatgtcctttagcgacagcctcttccaatatcttgattccttcagtgtacggcaagcgaacgaatgagtctttcaagaccccttccagacgagcgatcaattccttatcgaacatatcgttcaagaacttgatatcctccatacagttatccaacgcccattgtacgcaatatttaatgaactcctcggccaactccatattgtccgtgatatcattaaaagcgacttccggctcaatcatccagaattccgccaaatgacgaggcgtatttgagttctcagcgcggaacgtagggccaaacgtataaatctgtcccaaggctgtagctgccaactcaccctccaactgtccggaaaccgtcaagctagcctgcttgccgaagaaatcgtcctcataaatgatagagccattctcatcctttttcaagtcgtacaaattcttggtagtaacttggaacatctgtccggcaccctcacagtcggaagccgtgatgatcggcgtatggaaatagaaaaagcctctatcatggaaaaacttatggatagcgtaagccatattgtgacgaatacggaataccgctccaaatgtattcgtacgaggacgcaaatgagcgatctcacgcaaaaactccatggagtgtccctttttctgcaacggataagtagctggatcagccgtaccgaagatctcaatctcagtagcctgtatctccacgctttgccccttgccttgggattgtgtcaagataccgtttacgctgatactagctcccgtggtaatcggtttcaagaactcatcacccaatttatctacatccacaacgatctgaacattattaattgtagaaccgtcattcaaggcgataaaattcacctgtttgctaccacggcgggtgcgaacccatcctttcacgttcacggtagtaccgaaagcttcgcttttcagcacgtctacaatttttgttcgtttaattgtttccatctgtatcgtttttttttattcgaaagctcccatcctaagagcgttcacttccctttcatttaagtaacgccatttaccgcggcctaagttcttcttagtcaaaccggcgaaataaacacgatccaatttcgtcacatgatatcccaacgattcgaaaatacggcgcacgatacggttacggccggaatggatctcgatacccacttggctcttatcgtcctcgctagcatagctgatagcgtccgcatggatctccccatcctcaagctcaaggccgttggcgattttctccatatcctcgatagccacgttcttatccaaccacacatggtagatcttcttcttcttgaaagatgggtgagtcaatttagaagctaaatcaccatcgttcgtcaataacaagacacctgtcgtattgcggtccaagcggcctaccggataaatacgttcttggcaagcgttcttcaccaaatccattactgtcaagcgttcttgaggatcatcagaagtcgttacgcaattcttcggcttgttcaatacgatatacaccttgctctcaatctgaaccggcttctcgttaaatgtaacaacatcttgacgagtaatcttagtacccaattccgttaccacgacatcgtttaccttaacagcccctttctggataaactcatccgcctcacgacgagagcaaacaccagcgttagataagaatttgttcaaacgaatcggttcgttcggatccgccaagacttccttatacttgatctgtttcggacgcatgttgtaaccctgctgtctttggaaaccacctcctccaccggaacggcgattattattgtaagaaggacggcgattatttccatatccaccacccccttgacgattaccgccataagagttatcgttaccatacgaacgtctgggtgcgtaaccgtccccgccgcttgaacgtgaatcattgtaatcaacccgggtatcacctactctaggtcttcttttcttcataccatccgcagacattccctctccggaaggactagcggaataagcctttgccggtccatcataattaggacgagacggacgattgtattgccctcctccattcccatatgacgggcggttatttccataagacgagcggccgctgttgtagccaccttcacggttgttgccataagacgggcgattatttccatacccaccatcgcgattgttgccataagatggacgactattaccatagcccccctcacggttgttgccatacccgccttcacggttattatcgtaagaacgcggacggctcggacgatccccgtatgaaggacggttattttctccataagaccgatacggtctacgttcatagctaccctcaggtttattataaccctgattgtaaggtcttctttcaccttcttggtctgtgttttcccgtctgatacttggtatcactttttttggacgcagttgagattcatctctttcttctgtactcatttgttataaattaaacaatggttaaaaacttggtagcctcacggctacctgtattatcactaaattcctgtataattatgaggcgttatagcccttaattcatctttaatccggtcgctaacattcaaggtttcgataaactccttgatagattgctccgtaacagtctggttcgtacgtgtcaaagcttttaatgcctcgtaaggcttcggataaccctcacggcgtaagaccgtctggataccctcggctaccacagcccagcaattattcaaatccctacttagggcgttctcgttcaataacaatttacccaagccttttgttaagctcttgaaggcaatttctatatgtgccaaaggcacgcctacgtttctcaacacggtagaatccgtcaagtctctttgtaaacgagataccggcaatttcgtagccaaatgctctaaaatagcgttagcgatccctagattaccctcagcgttctcgaaatcaatcgggttcaccttatgtggcatagcagacgaaccgatctcacccgccttgatcttttgcttgaaatactccatggagatatattgccagaagtcacgattcaagtcgatcaagatcgtattgatacgcttcaagccatcgaagatcgctgccagattatcataattagagatctgggtagtccactcctcacgcttcaagcctaacacctcactaacgaacttgttaccgaatgccctccaatcatattccggatacgctacatgatgcgcattgaagtttcctgtagccccaccgaatttagcggagataggaacggcctttaacaatgccaactgttgctccaaacggtaaacaaagaccatcacctccttacccaaacgagtcggagatgccggttgcccatgtgtcttagccaacatcgggatatccatccattcctcggcgtattttttcaaggcgccgatcacctcttccaaacccggataatacacctcttgcaaagcgtccttgatcgataaaggcacagatgtgttattaatatcctgagaagtcaatccaaaatgaataaactcgtggtatttctccgcaaggaaatgatttgttttttccttaataaagtactccaccgctttcacatcgtggtttgtcacgctctcgatctccttcactcgtaaagcgtcctcctccgtaaactcctgataaattttccggagccccttttttacttccgccgcatttaactcgcttaattgcggaagaaactcagatagagtaataaaatactcgatctcaactcgcaccctatacttgataagtgcgtattctgaaaaataagccgccagattctcagccttattcctgtatcgcccatccacgggcgaaatagcagtcagtgtcgataataccatatacattattaatatagagtcgcaaagttaagtcttttccattgaataataaggtaagcaatcgttatttttaactaaatgccccgtttttaggaccatcagacacttacgtagccacatccaaacaaaattcatattcatccacattttttcgtcaaaaagtttggtggtaataaaaaaagccgtatctttgcagcgctttagagagataaagcgaacgaaaaaataagtttaaagggcgtttagctcagctggttcagagcatctgccttacaagcagagggtcggcggttcgaatccgtcaacgcccacctttaaatttattatttcaccgaaagattttcgggcgtttagctcagctggttcagagcatctgccttacaagcagagggtcggcggttcgaatccgtcaacgcccacttttaaatttattattttcaccgaaagaatttcgggcgtttagctcagctggttcagagcatctgccttacaagcagagggtcggcggttcgaatccgtcaacgcccacaatagaaaagattgtttggtttccagacagtctttttttatttaggaaccagagagtttacccgaggttccagaaacttttccaaagcaagttaacttccctacaattccctatctcttctgcgacaagaggacagcgatcagacgatctaacgagaacttaccaggtcctgctatatacatcaagataaaaatgaccaagtaaacgaacgccaactctttcaaagaaaacggatcattcccgtgaatcacgaagaaagccactcccatggtaaaaatcatcgggatcattgccaaccgatagagcgcaccgagaataaagccaatcgaacaaaaaagctccccaaaaatggccaagcctagagaaaccgaatgtccaactcccagtgggtccggaaatgcggcggacatgctctcaaaattcgtccacttctgtattccatgcgaaagcaatagacctccaaataacaaacgaagcgccaacaacagtaacgatatagctgtaccatccggcttcattggaaaaagaaatttgtaaaatgctgacataattcccctattttttatcttatcaattcatctttctggtaatataacaaaaacgaagtaaggttagttcagcaaaagctccgggaattgacaagcggcttatctttcgccttgcaaaacgtttgccactactatcataacactatttaccttattataatacaacgacttgaaataatacatcttcaaaagaataacaatttaacaacatgctaattacctttgttttccgtgttctttcattacttaaataactccatcataaacgtacataaaaactttcggttttttcgtaagtttgtagtcgaaaatatatttcactgaatatgagaaattaaattaaggagaacaggagtaacagtgaatatatcaaatgagtaagtatattacgaattattacatttagactatgcttttagaaaaactacttaaaggatttaattatagcaccagtactttcaatttgaaggaatctaagttatttgaccaatattttgaacgaatattgattagtaaaggtacatttttggtcaaggaaggagaaatagagaggtatagttatttcgtttttgatggaatattacgttgttggctattaaatcataaaggagaagaacaaatcttttggttttgtaaagagggtacgttctcaatgtcgaacatatcttttacattacaaacaaagtctgcgtttaatgtgcaaacaattgtagatagcgttatttaccgaatagacaagaaacaagaaaatgaactatacaccgctatacctaaggtaaaaactgtatttgaagatttgaatgctatattgctgaataaactcttgaaaagaaatatcgacttgattaaatattcccctgaacagtattatctacagatgattgaagaatatggcattacactaaactatataccgctaaaagatatagcttcttatttgggtatcacaccacaagcactaagcagaatccgtaaacgtattttttaacttagattcagtgctttaaatgtaaaagttccgaactttgtagctttaaatagtaattacaattatgattagaaaaattaaagttacagatcatccacgtttgatggaaatctgggaaagtgcagtattaaatacacatgattttcttaaagaggaagattttctatactataaggaacaacttccagtatattttcaacatgtcactctattcggatttgaacaagagggaatcttagtaggatttatgggaatcgcaaaaggaaatcttgaaatgttattcattgacaataattatcgaggtataggaataggaaaaaaattaatcacttatgccatagataatttgcaagtaacaaaagtcgatgtgaatgagcaaaataatcaagctgtcggtttttataaacatataggctttaacacatacaaaaggtctgatttggacggagaaggtaaagaatatcctattttacacatgcggttatagttttccttaaaatcacataaacaaaaaatccttggaaatccaacgattaccaaggattttttgtgacccgggtgggactcaaacccacgaccttcagaaccggaatctgacgctctattcaactaagctaccgagccaaagactgcgcaaaagtacatataatatcttagtttagcaaatacaggagagaaatattttatttttgatattttgcatataagtattctgcttattctgccattttgcaaataaaagcgatcacattcttgttattttgccattaatcattatctttgccgcacatatttcacaaacacaaagtacaacaagtatatgagctatcttattaaacccgcagggtataaagccttacttaacttatcccagactgaaatgggaatcaagaagatcaaggactttttccagcaaaacctctcatccgagctgcgcctaagacgcgtaaccgcacctttattcgtacttaagggcatgggtatcaatgatgatcttaacgggaccgagcgagccgtcacttttcctatcaaggatttaaacgactctaaagcagaaatcgtacattcactcgccaaatggaaacgactgacactcgccgattaccacattgaagaaggttacggtatttacaccgacatgaacgccatccgctcagacgaggagctaggtaatttacactctttatacgtggatcaatgggactgggaacgtgtaatgagcgaaagcgaacgtaagatcgatttcctcaaggaaatcgtccgtcgcatatatgccgctatggtccgtaccgaatatttagtttacgagatgtttcctcaaatccgcccgacgctcccccaacagattcatttcatccattcagaggatttgttacaaaaatatcctacctttacaccgaaagagcgggaagacgctattaccaaggaatacggggccgtattcattatcggtatcggatgctcgctaagcaatggagagaagcatgacggacgtgctccggactacgatgattggtctacgatcgccgagaacggacaaaccggattgaacggggatttattggtttgggatgatgtactaaaccgttctatggaactatcctctatgggtatccgcgtcaataaggaagccttgctacgccagttggatatttgcaaagccggggagaaaaaagaactctatttccacaaacgcctcttgagcggtgaacttccgcaaagtatcggcggtggtatcggacaaagccggttgtgtatgttctatcttcgtaaggcccatatcggagagatacaggcaagtatctggccggaggagatgcgcaaggaagcacgtgcagctggaatgatgcttatttagttaacagccaactattatattatggacgtaaagattgaagaaagctggaaaaaacggttagccgacgagtttgaaaaagattatttcaagcaattgaccgatttcgttaaacaagaataccgccaaggtactgtttatcctcccggtccttatatgttcaacgcttttgagcactgcccgttcgataaagtgaaggtcgttatcctcggccaagatccttatcacgagccgggacaggcgcacggactttgtttctccgtgcaggatggggtacctttccccccttccctcatcaatatattcaaagaaatacaagatgacttagggcatccggttccaacaaccggcaacttgattcgttgggcagatcaaggcgtattactgctaaacgccacgctcacagtacgagcgcatcaagccggttcccatcaaaatagaggttgggagacctttaccgatgctgttattcatcgtctggcggctgaaagaagccatatcgtttacatattatggggttcctacgcacaaaagaaaggtgctttcatcgattcatcccgtaacctggttcttaaatcagcccatccgtccccactttccgcttaccggggattcttcggaaacaagcatttcagcaaagccaatgattatttaatcgcaactgggcaaactcccatcgaatggtaagatcattgagaattgaaaattagctatacaatccaataattttcaattctcaattttcggttcttaataccactgctgtccatccctataattacttctcttatcatacttcaaatctttcaataaagcagagcttacagcgatactgaatgtataggatttataaggaccaaccggaacgaaactagccgtcatttgccagcagtgcaagttacgagttacgttacaagtcatataagagatcttcttagcgtcaaaatcataagtagcgttaaagttaaaacgccagttctttgtcggctggatatttccgttaaagctcaaagagtgagtcaaggcgtaatcatactccagtttagaacgattaaaatcaccataccgcaaactcaaaccataactaaacgagaggctccaaggaatcttggaaattaaatagccatcggcatctgtctcaccggtctctttctttttgcccaacagacggccaccactttccttattctcgccctctccttctccatccgggttcaagccatccggatctgcattcggatccgtagaagccgattgattcccagatttatccgatgaactatcacctcctccaaacaacttcttaaacgtatcattattaaatgtataagaaaaactggtgctagtccctctcaaacggccaatacccttgcctgctttccaacggggaatatcgacacgatgcccattctcatcgtacgtataggtatcgaactgaccattcaagttcaacgtataactcttggataatttcaaacgtaaaccgacactcaagtcactccacttaaatgaatccgccgccatattataactcatgcctaacgacagcttatcgatcagactaattttcttgaatccagtagagtccttatccgaacgcaccttcatctcgatattgttatttacgtcaaaactgatatttccttgttttcccgttcccggaacgccatacatattatgagcaaacggagaatacgtatattcacgatcctcaccattcgcgtcttgatatacataagtctcataaaaaccaaaacgagaagaagcgaagtccggctgggcgcttaccgtaatagacggctcgaagcggtgacggatcatctcaaccttattacccaagaatggcaacggtttataaaaaccatacaaggtcgtagacgcagagatagaagcgttaaaatcgtaaatacgataaaaaccatacgtagtgtcgcgggctaccaaagcctgtttctgcgtatcatattcctgttcgatcttgctggtgtaccaacgttccttataattgaaagagggagaaatattcaagtacttgagcacggagaatgtagcgcttaccggaatcgagtgctgcatagcattctgccaatctttgatcaaattcgatttgaataataagttttcctttgtcgtgatactattactgaacgtaccggaataactcatggagatcttctcgtaccaacgctccttcccgaccggatgcttccgcttgaaagggaagatacggctcatcgtaaccgtcatgctaggcaaggttacggcgatagaagaatcacgggtcgtctggtttatactcatcgtaccggagatcgtgaacgggttattcgggaaacgtttcgttatgttgatggatgaactcttcgtattctggttcacgtcggcatacccgcttgcgttcggatataaactgttctgattattgcggtcatacgaagaggtcgagaagtttacgctcgccgaaaaagacagataaggattcgccttagggtcttgcgtatgcgtccagttaaccttgaagtccttggataaattatagtcgggcaatcccttatcgcccaatttcgtcaccaaataagaagcattaaaactgcccgagaatttataacgtttacggtaagccgacttagccgacaatccccaagatcctttcgtataaatctctcccaataaagccaagtccatataatcgctcaaggcgaaataatatccaccgtcacgcaagaagaaacctctggtagactcgtctccgaaagtcggcataataataccggatgaatatgtactcgagaacgggaagaaacagaaaggtaacccgatcggatacaacggcacgtcctccaagaccagatagaccggacccgttacgatattctttttcgggcgcaccttcgctttcgtcatctggatgtaaaagtgaggatgctcatgctcgtcgcaggtcgtatacttaccacccaccatgttcaagatatccccttccatctttttcgttcgcccggcagtaacatacccttcgccctgctgggtaatcacgtccgtgatatatcctttcttggtaccgaaattataccgcatcgtcttcgactcatattgctggtcgccctccttaaacaacggatagccaaactcctgcccgatagagtcgagtccaaacttagcgaacacgatgctactatccatattcatctcgatcaattcggattgcagctcgatattctggtatttgacatcgccttccccgtaaagatatgcccagttgccagctgtcatcacgatagaatcggtcgcttgataactgaccggagcatctagcccggtctgcttttctggaatcgaatctcccgctaacgttgtactatccgtaggagccaccaagagagaatcagtctgcgccaagctatcggcaggagcgacaatctcctgcgcttgcacgcccaagcctcccaagaggaaaacgaatagaatgattaggactctatatatcaaaaacattacttcgttctttgcagtgtgttacagcgtgcaaatgtataataaataaacgagcccttatgcttttattcccctaaaaagagtttacaccagtgttcaaactgctcaactgtctcatttccatacttggataagctctgttttatcttatcagccggtttctctttcgtcaatttagtcttgctaaagaatttatcagcgaaacagatcaattgttcttccaatgacacgggacgcatatcccgatgtggaacaggcaggttccgttcctcgatcatggcaagcgaaagccccgtccccgtatgcctctcgcaaactaaggcgtggcgaggatacccctctttccgcattaaatcggctcccagatagccatgacagatataatcggcctccccatggcaatcgatatccggtgcgttacacaaaaagatccctatgtcatgcaacatcgtcgcttcctcaataaaagtcagatccagattcatctccggatgcaaacgggccaatgctaatgccttatccgccacgctacggctatgagtcaccaaaatccggtaggcatccgaactttccggataatatttctttattatatcaagaggtttcatcctatttatttttttgcgagacaaaaataaacaatctctctcacatatggatgagttcgcagaagatatactgcattggccaagtaatatatactgcgttagcgatgttagtatgtattacttggcaaagtcagtactacttctcatcactgatacccctgaaaccaattgcccagcttcaaatcttttatatccgcacctgtttcccgttcgcctctcaaatactcagagaagtaatcgaccatccgccagtaataatattcattatagtcatcaaaatgatgacgttttcccggtacgatcaacatatcaaagcgcttgcccgccttgatcaactcgtccacgacaacaatggtatttgccggatgcacattattatcgatatcgccatggattaataacagatggcctttcaagttcctcgccaattcctgattggtcgggatgcgaatatcgaacgagatatttcccatatcatccgtgatctcctttactccatggtgtttctctccccaccaccggttataaatgttattgtcatgattgccggcacaagataccgccaccttaaagaaatccggataaagcagcatagccgctgtagacatgaaaccgccaccggagtgtccgtgtatgccgacccggttgatatccatgaatttataacgagcgcacaactgctcgatagccactttatgatccgccatcggataatcacgcaaatttccatatccataattatgataccacttggagcgactgggatgccctcccctgtgtcccatgcaaaccacgacaaatccggcttgcgccaaacgatccgtacgaggattcatcgggatgtagcgaaagaaagttccctcctgttgcggtccggggtatacatagttaatgaccggatatactttcgtggaatcaaaatcaaaaggcttatacatgacaccatacaaatcggtcaccccatcggccgcctttaccgaaaaaggctcagggaatttataacctgccatgaataattgggagaagtcactctcctccaaggtcatcaatcgattaccttggttatcatacaatgccgtagccgggatcgtattgacacgagaatagttatccacgatatatcgcatggatttatccatagagaccaggtggaaataatcgcccggagtaatcagctttaagcccgaaccatccagattcacccgatacaaatgctcgtaataaggagtcgtatctcccttttcccgggcattcgccttgaagtaaacgacacgattcttactgtccacgtctacgatggcgtccacatgccaaggccctttggtgatacggtttttcaaatttccttgcgcatcatatagatacagatgcgcccaaccatcccgttcgctccaatggatcaattccttaccattatcggtcatcgctagcgggcgggtttccatagaagtatttagacgttcctcaatgatcgcttttaccgaatcctccccgatcgtatacgaacagatatccacccgtttcatatcccggctgacacgggtcaaatagaaggtctggttatctcccaaccagatcgagttccgagtgagtcccgtacgctccttatccggcttggaggctagattgattgtttgatctttaaaacaatccacccggatttctttccgcttcccggtattttccaaatcaaagagatataaatgaacgattggagaacccgcctctcccggcatctgatatttataggtctcaagtgtaggacgaggtttggcgatcgagttaatcacccataaatcttgcaccacacgttgatccgacaaagtcgcggcgaaataacgaccatcgggagaccagttccccattacatatttccgcttatggtcacataaagtatcggtattcaagaaggtccggggcataccaaagccaaaatctttttcgccatccgtagtcaaggcgatctcggatatcgtcttatcctccgggtccttcacggccttctcataatcctcataactcatgacatacaggttcaaatctttcgcgaagacgacccgctttttatccggcgatatattcgcccaacggattttagcaggaatctcgtctttcgtaatccgagtcaaccgggaggacggataatcatacgagaaaaaatagttcccgttcgtaccctttatcgagaaagtaaacgtgcgatcatcttcctttaagcgtaaatctccgataggaagttgttgtccggtaaaaggctctctcacgatctcgcttatctgtgccgccaactcatcccgatcgaataataatcgtttatttctcgaattggggtccaccagataccagtttgtcccctcactcgtcttatactcataccagaacttgtcactattattaaaataattgggggtaagggtataagagaaaagtagctgttccgcattcgacggggcgaaacggcgtgcttgcgtatattccggtaggacatcttgcgcataggtaaaaggcacccatgataaactcaagaaggctaccgcataaaaaagtgtttttacattcatagattcttagtattgtctgttattcgcctcaaaagtataaactttctgtgaaaaacatttcgtacttttgcggttagtatacagttattatatatgtaatgaaacagatctttatatttctagtcatactttttagcctgacgccaacggtctattcacaaaacgccccgttaaagctaggtgccgagcggatggatgtcgtcacccgtttgcttaaggataagcgggtcggattagtggtcaaccagacttccattttggaaaagcggcagattcatttattagatgcgctagtagcggaaggcatagacgttaagaaggtgttcgctccggaacatggattccggggaaccggtgacgccggagaggagataaaagatagccgggacttgaaaacaggcatccccatcatctctatttatggaaaaaacaagaaaccgtccaccgagcaactgggcgacctcgacgtgattgttttcgatatacaagatgtaggtgcccgtttctacacctatatcagtacgatgcattacgtgatggaagcctgcgccgaaaacaacaaagagtttatcgtgttggaccgcccgaacccaaatgactttgtagacgggccgatccgccaaaagggatttgagtctttcgtaggtgtcgatccgctcccgatcttgcacggcttgaccgtaggggaattggcatggatgatcaataaggaaggctggctgaaaagtacgcccgatacctgtcggttaaagatcgtaaagatggagaattggaaacacggagatccctattggttgccggtcaagccctctccgaacctcccgaatgaccagtctatccgcctgtatccgtcgctttgcttttttgaggctacgaacgttagcgtgggaagaggaacctattatccgtttcaagtactaggtttcccggatcctaaatacgggaatttcacttttaccccgacctccttacccggattcgataccaatcccttgcaaaaggataaagtatgttacggcatcgatctgcgggaatatccgttcgaaggaggattaaccttgcgattcttcctcgacttctacaataaagcgggaaaggatcaagcctttttcttctcccgtccgaactggttcgatttattggcaggcacgaagcagctccgctaccagatcgtaaggggcttatccgagaaagagatccgggaaagttggaaacccgagctagatcaatacaaggccatgcgtaaaaagtatttactttatccggactatcctactcaaaataaaaaataagaacgaatgaattattgggaatcgcatacccaagtcgccgtacgtttccgccgattcgaccggaaacgttacgccgcattccggagtatgcacaaagtcattaacattggagtcgtaacagcaagtacgctactattcgccctgcccgacacggcgcaagctcaaaagacaatcgagcctaaccggaccggcgaggaagcttccgtagagctggaagaggtagaagttaccgcctcccgtgcgcctatcgcacggaatcaagcgaccaagatcgtgacagtcattcccgcccgtgagatcacggcggcacctgtcaccagtatccaagatcttttagaatatgccgcgggaatagacgtccggcaacgaggagaaggaggcacccaagccgatatctccatccggggagggacgttcgaccaaatagcggttctcttaaacggggtcaacctctccaacccacaaaccggccattatagttttgacctcccggtgaatctctcggacatagagcgcatcgaagtggtatccggcccttcttcccgtatattcggggccagcgctttcgccggagcgatcaatatcatcacgaaaacaggaaaagagaacaggatatcgaccgacaattacgccggaatgcataagctatggaaactggaagctgccatcaatcacgcaaccactcatttcggacagcgcctttccgcagggtatgcctcgtccggagggtatatagacaatacggacttcaaacaattaaatcttttttggcaatcggaacttaaaagcgaggaggccgatttccaattccaagccggatacaacgacaaaggttatggagcgaatagcttctactccgcttcctatcccaatcaatacgacaagactcgccgcttcttcctctccgccggaggagaaacacatggcaaaatcaagttcacccccaaggtatactggacccgacatttcgaccggtacgagttgttccgtagcgatcccgccgattggtataccgggcataattaccatgagacggaagtatttggagccaacctcaacgccacgacacagtggaaactaggaagaaccagtatgggcgtggaattccggaacgagggagtaaggagtaacgtattaggcaagccgatgaaggaaccgcaggatgttcctttcgagaaagaggggcaatatctaaaaagcgataaccgaaataatatcagctactttcttgagcataacgtattattacgccgcttcacgttgtcagtcggggtcttggcaaactataattcggccttaaacgaagggattcatttctatccgggaatagatgccagttaccgtatcggggacaatttccgtctgtatgggagctggaaccgggcattgcgtatgccgactttcaccgatctttattatgagggtaagacgaataaaggaaatccggacctaaaaccggaggaaagcgaagcattcgaggtcggactgaaatacaacacttacttcctccgggctcatatagccggcttttatcgaaaaggcaagaacatgatcgattgggtgaaagagaaaccggaagatatctgggaaagccaaaatctgacaaaagtcgataaccttggtttcgagactaacctgagtttattaccgagggaactgggcaacgaacggttctttatccggaaaatagaactgggatatgcgtttatccatcaagacaaggatagtgaggggtatatatcgaattatgcgttagattatctgaagcacaagttcacggctcaattaagccattctatctggaaaggtttttcggccacttggtatgtccgttggcaagaccgggcaggtagttatactaaatacgagaatcttaagccggcttatgaggaaccttacgctccttattgcttagtagatatgaaagtaaattgggaatatcagcggttaaatctatatgcggagttaaataatctgctcaattccacttattatgatctgggaaatatcccccaaccgggtatttggtttaaggcaggattccgttatagtttcaaatattaatacccagttgtagagacggggcgtgccccgtctctacaactgggtgattttatttttgctttttgatcaccaacaacttatcattattggtcccgaacaaagcgatttccgtaacaggagccgcctcaccctgtgcctcaaagcgcaccaccttattaagcgcttccagcaactcccgctcgccgctcatatccgggcaagccattcgggtagtcgctacctgtgggaacttaatgatatttttataagcatcattatattcgatcttccccatcaaccgattgcaaccggcatttcctgaaagcccttgacgagccacgtcgaacactaaaacctgatgagtctcctcgggattcaacgtcttaccgttcatctccacgacaccccattcaccatccagatccgagaaagaagctaccaccgctttcttggacttacaaccggcgaacaaaccgacgcctaccaaaagcaggcaaatataaaaaagaccttttcgcattaatttctctccaatactaataatacattaccatcttggtctaccaacaacatctcattctcatcttttccggccttcacggaacgaacctgatccatcgattgaagcacgctcgtctccaaatccatattcggacaagccatcatagtcgtagcgcccggagcgatcgtaatagaagatacatcttccggatctaacgtgatcgtcgtattgaataaattacagcctgtatttccatgtaatttcttctcagccatattgaagtccatctgcggcaggccttcttccaagactttctcacctttcacttctaccacattccatttaccttccaacttcttcacatctgtcttgacgtctgaacaagaaaacatcatcccaacgaaagcgggaagcaaaaacgcataaaacaatacctttttcatcttcatcataatcttttataaaatatctattgtaattagtaagacgcaaatagaaggcaaaatgttcccaagagcaccctattttagcttatattaacagggttctttattaacatcctctttttccacttctgcgttcgccaccgcaaacagagtaccgcaccccgggaacattcgtccaaagcaaaagcgaaccacatccccgctaaacccaaaccgaacacgattccgaacatatatccgcagaacacggcaaagaaccacatgcaaaataactcgatgattaccggaaccactacatcgcctaccgaacgcaaacagaaaaggaacagcagtaccgtggcccgcccttgctccaagagtacatctaccagcaaggctcccatcgcgatcgttatgattgcttgattctcagtaaatatccccaataaaggacgtcccagcagataaaccccggtactagcgactaacgtaatcagcaacgacctcctccaagcataccaactcaataaataagcggcttgcttcttcctcgcacccaccaaattgccggtacaaatagaagtagcttgcgcgatcgacaaagaaaagatatagccgattatcacgatattcatcacataaacacgcgctgtcaagtacccattacccagcatattgataaagtagacaatcgtcacctgcgaggcatcatacgagatttgttccgccgccgaaggcaaaccgatcttcaacacatctttcaacttctgaaacgggaacggacggaaataagccaaagggatacgaggcaccaaccgcttgaacagcatgataaacaaaagtgtcatcgccactccccggcaaacagaggtagagatagccgctccttgtacaccgagggcagggaaaccgaaatggccaaatattaacgcataattcccaaacacattcaatacattgatcagcaaggtcacctgcatcgcgtaattcggcttgttcgccgcacggagcaccgccgatatcgtaaaactaaccgcttggaagaagccgaaccctccgacaatgtgcatataagtctcagcgtccggcatcagatccggacggatatccatcaggaccagcatctcctttccgaacaagaaaagcatcaagctgatcaagcaaccgattcccgcgttaaacagcaaagacgtccctaatacctgaataaaacttttatgatccttcgccccgaaatagagggcgcacatgacggaagttccggtcgtggtaatattgaacagcaggaataccatgttcagcaattgattcaccacacctaccgccgccaccgcattatcggaatgatggctcagcataagcgtatccaccacgcctaaagtcaacatcagcaaggtttccagaaagataggccctgttaatttaaataatttgcctctcagccctctcggggcacggaatagtctatacatgtccattgatctgctttctacctaaacaccttttttacgagtccgcgaaggtacaaagctttacgctaaataggtttcgctatttctattattttccgtaagtttgtatccggttgaataatttttgatgaacaaacgaagacaaatggacaagaaactacctatatgtatcgtattagtcatgttgatgagttgtttctcctgcaaacagccccaacagcccacggaagacgcagacatggatacgcagtgggtggatagctcacagcatctgtatcaatacggcatctgtatcgattccttggacgtaaaagagtatttgatgaaaaacggggataatcccgcctccatcttctccgggctgggcttcacggccttgaaagcagacagtatcagcagggcatccacccatgtcctcgatccgacgaaactgcgagccggcatgcattattacacattttccacggtagattccttggagacgatccgatatatcgccttcgccaagtcgctgaccgattatgccgtaatcgacttgaccggcgatacgatcaacgcctatgaatttaataagccgatcaccctcaagaaaaaatatacggaaggagtattaaactcttccctatggaacgtgatcaaggccaacggaggtgatccgtatctggcgatcaagatatcggacgtgtacgcttggcaaatcgatttcttcgatatcaaagatggagactcattcaaggttctatacaatgaggcttacatcgacgataccaccgccttgagcatcgcctctatcgagggggcgatctttacgcatcaaggcaaagagtttgtagcgattcctttcacccaagacagtatcttcgaatactttgatgaggaagggaacagccttcgcaaagcgttcttgaaagccccattagactttttccggatcacatcccgttttacgaacgcccgtttccacccgatcctcaaacgataccgggcgcatcatggggttgattacgcagcaccgaccggtacaccggtacgcagcatcggagctggtacggttatcgccaagggatatcaaaacggcgggggcaatttcttgaaagtgaaacataactccgtatacaccacgacttatatgcacttaagccgcttcgccaaaggaatccaagtaggcagccatgtgcaacaaggccaagaaatcgcttatgtaggctccaccggactctctaccggaccgcatctagacttccgtgtccacaaaaacgggcaacctatcgatccgctaaaaatggaagctcccccttctgaaccggtgaaaccggcctatagggatagtttcgctttcgttaagcggcaaatcttggcggaaatagatagctttcatgtagccacagttagtaaagcatctgttatatatgagaaagatagtatcaaccatttaaataactagcgtatgaaattcttggggaatataatatggttactcttcggagggattataacaagtgtagaatatctgatatccagcctaatactaatgataacgatcattggtataccttttggcctccagaccttaaaattagcgatactggctttatggccttttggcagccgtgtcgtagacgaggggaattccggaggatgcctgtcacttatcatgaatgtgatctggatattcgtcggaggcttttggatttgccttacgcatctgggattcggccttttgctatgtatcacgatcatcggcatccctttcggcatgcaacattttaagatggcagctttagccttggcgcctttcggaaagagcatccaataagggaacgtctgacttttctgtagaagacagacatccggcaagaatttaggctaggataaggtattatacctatttctttctatacctatacattctcgctccttattctatttcataaatcacggtatggtacgtacagaccacgccttggtttgtatagatcaagccttggtctgtagagttcacggcgtgatctgtagaattatactagatattcaaatgaattcatccgatatctttcaagtattcataaagaaggagggaagtataaatagcgttcatatacatctccctcatagggcctaggggcgttatagctcgatctgggaaaccgaaaccggagtattcatgaagatagaggccgcctcagaaaacttctctgccgactccgtggtaagaaaacggcaacttcctcccttcgtgagcttacgatccatttccgggtgacgccctaaataatctcgcaaactctccgctacatgctcgccttgcgagaatagagtgatgccggaaggaagaaaagcacggatcttatccatcaaaaggggatagtgagtacatcccaagataagcgtatcgatttgcggatctacggataatagatggtcgatatgctttttcacgaaataatccgctcccggagaattaaactcattattctccaccaaaggaacccacatggggcaagcttcgcctgtcacttggatatgtgggtacatcctgccgatctctatcgtataagaattggacgtaatcgtaccgctcgtacctacgataccgatatgtttagtacggctgatcgtatccactaactcaactgtaggacggatgactcccaatacacgacgattgggatcccatgtaggcaagtctttttgttggatcgtacgaagcgctttcgcggatgccgtattacaagccaagatcaccaattggcaacccgactcaaacagacgcgataccgcctgacgggtaaattgataaacgacctcgaacgaacgggttccataaggagaacgtgcgttatcgcccagataaacgtaatcataaccgggcatcaactgatgaatcttatcgaaaatcgtaagtccgccataacctgaatcaaaaagaccgatcggaccgggagtttgtggaaacatatcagaaaccttcttttataaagtacaaagggtgcaatcctttcggaaaacaccccctcttttattctatagaataaattttctcgctaattacaaaccgagtttcgtacgaacaaacggagttgcgtctactgcgttagtacccgtataaagcaaagctgccggatcgatgatatacgtatatcccttctcctcgcctaccttctggatagcctcgtgcaacttctgttggatcggttgcaacaattcttgttgtttcttttgtacgtcttgctgagctacctgaacgaagttatccatacgttcttggatatcttgaatctcttgcattcttctcaacttgatattttctgtcaatgaatcttgctgcgctacgaagtctgaatatttcttttggtattcatcttgcatttgcttcaattcaactctatatttctcattcaagtctgccatttgtttttccataccagatacctccggcatagccataaacacctcttgagtttttacaaacgcaattttaacttcctgagcgatagctcccaacgggagaatcatcaacaataaaacaataagtttcttcatttttactatataattactttgttattaatcaagctttcacacttttcatgcataaagcgcacaaatgtaagcatttattttgaatatcctaacttaatcagcacttcattactgatatcgatcttcggagaagcgaaaataatgctcatagctgaagctcgatcccaaacaatttgatatcccttgtcttccgagatttctttcaccgcattatacacctcgtcttgaatcggtttcatcaaactctcgcgtttcttatataactcaccctcaggaccgaaatatttacgcttcagatcttgcgcctcttgctctttcttcacgatctcttcctcacgtttcgttttcatctcggcagagaggaataccaaatcgctctgataattcttatacatattctgagcttcttgctgaatcgcttccacctcattttgccatttcttggaaacttggctcaactgctcattggtcatttcgtaagccggaatattcttcaatatatattccatgtcgattaaagcgaacttctgtgccatgccggcaaaagaacaaagcaacatcagacagctcaatgtgataatctttttcatactctctttatttatagttctactttatgactgcaaatataacagagggtttacttacagcctaccaatattcgttaaaagtatttatttaaatgtagagacggggcgtgccccgtctccacatacggaacacgccccgtctctacatacgaagctatacccgatctatattttagaattcctgtccgatgataaagtgcaggttactaccgctacgtttaccattagatccataattcggctcgtcgaaaccataagcccagtcgagtcccatcaaaccgatcatcggcaagaatatacggacaccgacaccggcggagcgtttcaagttaaacggattaaaattcttcaaatcagtccaagcgttaccagcctccacaaataccaatccgtagatcgtagaggaaggctccagcaagaacggatatctcaactccatagccaaacgagaataagcgtatccataagaattgtaaccaccattaccggcgatactaccattctcataacctctcaaaccgatcgtttcctgagcataggtactggagtaaccactcataccgtcaccacccatatagaaggtttcgaacggagacttcttatttttattataagtacccaagaaaccatactcaacacgggtcatcaataccggcgtacgtttcacggtcaacggagccaacggagagaagatcttcgctttgaacttccatttatgatactcgatgaatttatacttatccgggtctgagcttgacatcgacgcataatccttaccatcgaataaagagtaaggaggcgtagcagctacagacaacatgaattgtgaacccttacgagtatacaacgggttatcgatagagttacgttgcaacatcaactccaagttgatattatggcaatttccgttattaaccaagaaatagtcccaatcatgcatcatatacaactgatagttcaacgtcgccatgaactggaagtagtcgtccggccaattcaaacgtttaccataaccggccgctaaaccgaacatcatgatagacttatccgggtcgtaagcatactcataactattattgtaaccatagttgccgtaatagttgctaccatagccataaccgcccccataataaccgggataaccatagccatagcccggatagccataaccataaccggaattggtcaagtaattgctactgatatcggtttgctttgagaaataagcgctgacagacaatgtattcggtcgtttaccgccgaaccaaggatccatgaaggagatgctgtaagcctggtagtaacgcccattcgtctggccgctcaaggtcaatgtctgtccctcaccttgcgggatgatgcccttataggttttcgggtttaagaagttcttcatagagaagttcgtaaacttcaaacttaacttaccgatcacacccgtctgtccccaacctgcggagaactcgatctggtcattcgccttggaaaccaagttatactcgatatccacggttccattctcaggatcaggcagcggcaccggattcatgttttccgggtcgaagtgtcccatctgggccaactcacgaacggaacgcatcaaatcctcgcggctgaacaacatacccggcttcgtacgcaactcacggcgaacgatatcctcatacagacggtcattaccattaatgataatacggttgatcgtcgcttgcggaccctcttggatacggatctctaacgagatagagtcattcgctacatccacctctaccggatcggcgttgaagaacaaataaccgttattaaaatagacattcgaaacggcatcctcatccgtactcaaacgttcgttcaatttcttttgattatacacctcgcccggtttcatacccagcacggccatcaaatagtccgtagaatattgcgtattacccacgaagcgaatatctttcaaatagtatttctcaccttcatccactttcaagaagatatctaccttcttctcgttaaagttcgctacgctatcggacaacaatacggcgtcgcgataaccatgctcgttatatttagcgattatatttttcttatcgttctcatattcctcagtcgtgaacttcttcgtgctgaacatctccatgatactggttttccagtcgttcggcaagctgaacttctcgttcgtcttcttcatcgccttcttcaactcccgggcggtcagtttttcgttaccctcaaaatagatacgatggatcttggtcttttcattcttatcgatattgatatccacgatcacctcgccttcattcgcgggatcgtccttttgctcgatctcgacatccacgttcttaaagcctttgccatcgaagaacttctggatcacgatcttggcacggtccatgacgttcggcgtcacctggaaacctttcttcaagcccagcttcgcctccaagtcctcacgctcgcctttcttgatcccgtggtaattgacttgcgagatacgcggacgctgcttcagctggatctccagccaaatctggtcgccctcgatcttcgtcgccaagatcttcacatccgaaaacaagccatgtttccaaaaacgcttcactgctgtagtgatctcctctcccggtacggtaatctcatcgcctaccgacaagcccgagaagccgatcaacacaaaatcatcataattcttgatacccgtaatctttatatccgcgatcttgtatttcttcgcggccaacgagtacgaaatgaccggcacttctgccggcgcctcaacttgggtagtgtctatttcttgggcaaacgcaccgcaagcgaaacccaagcaaataaaaaacagcactattcttttgtacatataacagctattgtttataagattaattgctcacttgtcttaccgaaacgacgctcacgttgctggtaatacaatatagcctcatacaactcttcttctctgaaatccggccaaaacacatccgtaaagaagaattcagcatatgacaactgccatagcaagaagttactgatgcgtttctctcctccggtccgtatcaaaaaatcgggatcggggatatttttggtcgtcaagtggtccgagaccatagcctcggttatatcattggggtttattttctgttccaagacctcttgggcgagttgcctagccgctctggtgatctcccaccgggaagaataactaagcgccagaacaagtgtggttcccgtattcgccgaagtcgtatcgatacattcttgcaatgtattataagcatcctcacgcaagcgggaaaggtcgcctatggcggtaaggcgaacgtttttcttcatcatgtccggagtctcccggtgaatggcggagaccaacaagctcatcaatgcttggacctcttcttccggacgattccagttctcggtagagaaagtgtacaacgtcagatatttcaatccgagttgagtgaccgcatccataatcttacggaccgaaacgacgccttcctgatgcccgaagctacggtctttccccttcgccttggcccaacgtccgttcccgtccataataattgccacgtgccgtggcaagcgattcttgtctattttctcaatcaacgacattttttatcttactaatattcacttatatttttcgcattgttacaagtacggcacctcgggccgaaatcccatgtaacagacaacaacaagaaagagtaccaatctttattcttaagagcgctacccttaacaccatacggatcgtccaacatgtcctttccctctaggccatcgccaaataacttacgaaacgagaactcgcaccctaaattaaggcggttcttgatcttatatttcatgcccacgcctaaaggaatattcgggctggcgaaagtcttcccgccacccggagccaccgtcagcccaatgcccaccaagacataaggagagaaacgcttcgctcccgcatagtcgaacttatcgctatacgggaaaaagttgaactccgcctgtccccccaactccatgatactacggttgaaagaggtttgggcattattcggaaaaacgttctccataccttcggtcttaccggaaacctgtccccacatcaagttggctttcaaggcccaacgaaagttgatgttataccggaacacggctcccaccgccggattcattcctttaaatatcgtattcttgttggcgtcgcccatataaaaggcgccaccagccataccaccgatctcgtacttatattcctgcgcccaaagcgtagggatcgtacccgccaataggatgattatgagaagccgctgaaaaaaagttgaagtcataagccttgctgttatatataccacacttctttttctaacgctaaaagcctcataaaattatacatctcctatcgaacttttctattccttcgggatcaaacgattgatacggcctctccaaagttggttcaagtcattggaaccagtgctgatctttcctccgaaaatgttcacgaaattctctttatccacaataattgaggaaaagcctctcgccgcatagtcggtcggtaacaccaccatcgagtcgatcaacgaccaagaaataccataatctatcgattgatacatatctttcaatgccttgttcgaagcgtcgatacctccgatcaagaaaaacttatcgtcataattcgtgatcatcgctccctcacgcttcgtgaagtttgcgtcaccggaagccatcaacgcccaagagataccatccatggtagcccaagtcgtattaaccacttggttgtccacggtacgtccgctggcggtcatcaagtactcatgatacattgcggcatattggagattgctaaatccggtaacagggaatccgctaggcaccgcatctccggcgatccactccatggattcgttcatcgcatagaacgctagctttccttcctgatccacgatcgtagccaaggcggaaggctgtttcgtgccctgcttcacgctacccaaaacgtatttcacgaaaggggcgttctctacagcgctccaagtcaagccatcctcggatctatataaagtgccatttgtagccggcacatataaagctttgttatactcagtaatctgggagatcaaaagcccatcggaaggcagaccggtcaaggataatgactgccagcccttaggcgcgcttaccggagcgtaatataattggtaaggtttaccggactcggcgggtttcacatacataaagtaattctccgatccattataatcgtaggttaccaccttctgatccttcacggtaatgccaatcataggattcgcgtacatactccaaaccatagagtccggaaccacttgatggatattcacttgcgccatatagacttttgtcgtgacttggtcatacgcatgaaccacgaactttaccggagcggagaaatcgatggaatccgacaaactacttaaataataagtggaatcgggataagcctcgggactagcctccacgccacctatcactgaagaattagcgaacccaatcttacaaaccactttctcgatcttcgtaccaaaaggtaaagagtctatattaaaaatccgtcccgttagctggtctatcgtaaacttcacagtatccaaccccgacacagaatcatgacttaatgaaaaagtatgtatctggcaattcttaatagcttctacaccaacgatttcatctgacttcaaacaagaagacagcactaacgcaaaacaacctgttataaatagtactaatttatttttcatcaaaaacataagtttgtcgcatataaaggcacaaaagtagaaacattttttgctttcaccctaatacctgctaatatttataatattttagttgattatatgagccttaaaattcatagttatgatttttcgaactcatcgttatgatttaaaatttcatagttatgatttttaatgctcataacagaacgtccggagatgccgctaacagcctcctttccaagcatcggcgcatgcaccccttgatacaggcgaaccggggccgtttccaccctcgcctcgtcccatacatccgcttccacaaaagaattaatcagctgagtcccaccttccaccaataaggaatccaacttccggacagcaagatgatctagcacttgccggatcaccggaccttcgaaatctatccggatatactccacgttctctcggttttccacttccttctccgtaaatattaatgtacgtgaggaaccattcagcaaccgataagaatcgggaataacgagccggcgatccaatacgaccctaaccggagaattaccggaccaatggcgcacgttcaatgaaggattgtccaataaagcggtccgtgtaccgaccatgatagccgccacctccgagcgaagtttatgcaccaagcgggaagtctccggagaagacaaaaccgtgaccggctccgacacgtccgtacgcaaacgatcgataaacccatcctcactctgcgcccatttcaagataatataaggacggcctttcgtttgtagcgtcataaacgccttgttcaacgcacgggcttcttcctccatcacgcctgtgactacctctatccctgcttcacgcaacatccgcacgcctcgccccgacacctcgggaaaaggatccaagcaaccgaccaccacccgtggaatccctttccggataatcaactcggcgcaaggaggcgtcttcccataatgagagcaaggctccagactcacataaatcgtactgtctttcaacaaagactcgtctttcacggaagcgatagcattcacctcggcatgcgcctccccacatttcctgtgaaatccctcaccgataatacggcccttatgcacaaccaccgcaccaaccatcggattcggactgacatttcccctccctcctttagccaactcgatgcaacgagccatgtatttctcttcaacctctaccataatctttgcatataaacggtttttacactactttcgcgataaaacaagagaaagatatgactgagaccgtcgcttacatccgaaattccctcaaagatatttatcctcccggcgaagcccaagcgctcgtccggctcatcatggaacgtgtttgcggtctttctacccatcaactcctgttaggcaaaggtaaagaattatctgatacggagaaatttaaaatcaaggagattgtagaaggactgcgtttatacaagcccatacaatacttattaggcatagcggatttttacgggatggagtttaaggtgacgccggacgtattgattccccgcccggaaaccgccgagttggtcgagcggatcatcacggactaccaaggccaagcccctcgtatattagatatcggcacgggaagcggctgtatcgctatttccttggcgaaacatcttccggaggcagaggtagcggcggtggatatatcacccgaagcgctcgccgtggccgaggagaacgcccgtatgaatcaagtttccgtatccttccatgaattggatatcctttccgaaggttattccagtttcatgcaagagaaacaaaattttcacgtacgtgaaactagattttcatgtacgagaaacaaaattttcacgtacgtgaaactaaaatcccatacggaggaaaccgaagcgtctcttataggaagcttaaactgcatcgtcagtaatcctccttatataatgtatagagagaaagcgaccatggaagcgaacgttctggagaacgagcctcatctagccttgttcgttcccgacgacgatccgcttctcttttaccgggccatcgcccgcttcggacaaaggcatttggtggaaggcgggcatctttacttcgagatcaatgccctttgcggaaaagagaccgtagcgatgctacgtcaagagaattacaccgaagtcgaattaatacaagatttatacggaaaagaccggatcgtaaaagcaaaaagatgaaagagataaccgaacccgagatgttgcaccgggcagccgcctattgctccgccgccgaacgctgcatacaagacgtacagaaaaagatcgatgccgccggacttccccccgacgcctccgagcgtatcatcgctcgcttgctgaaagagcggtttatcgacgaatcccgttacacccgtttcttcgtgaacgataagctacgattcaataaatggggacgggtaaagataggctacgagctttataagaaaaacatcccctccccgatccgggaagaatcgctcgccgccattgacgagggagaataccgctccatcttactcgatttactaaaaagcaaaaagaaatcgacaaaaggaaaagacgagcgggacctattcaacaagttactccgtttcgccgccggacgaggtttcgaaagccggatcacgttggattgcctaagccaattattcaaaggaacagactgcgaggattatgccgacgacatggaataatctgctcaacctgtttttcccaaacttatgtaaaatatgtaaacgaccactcgtcgagggagaagaacaaatttgcctgaaatgcctatgcgacctgccgcacacgggatatcatcaacaggcgaacaaccccgtcgagcaactttttatcggaaagaaccggatcgaatatgccaccgcttatctacgatacgagaaaggcggaaaagtacaaagcctgatccactcgctcaaataccatgataataaagagttgggctatctactcggacggcagatagcgagagagctccaagcggatcacagcccgatatgtaccgtagacctccttatccccgttcccctgcatccccgcaaaaaacggcaaagaggttacaaccagtccgaatggatcgcctccggcatccgttccatatgggatatccccatcgatacgcaaagtctagcccgcaccacccacacaagtacccaaactcgtaaggccatttacgatcgttggttaaatgtatgttctatttttaatgtcattcatccggaaagcttaaaaaacaaacatatcctgctcatagacgacgtgatcacaaccggagccacgatttccgcttgcgcaaaggctttatcagggattccgggcatacgcatcagcattttagccctgtctgtcgcataaatattaataaaaaattaacgtacgatattcaaggtaatgtcattcagtttatctatttttgcagactgatataaatataggattgtatgaaaacactggaaagtttagtagcagaaaaattattaaagattaaagccgtaaagttgcaaccggccaatccgtttacttgggcatccggctggaaatctccgatctacaatgacaaccgaaagactctttcttatccggtcgttcgtagcttcattaaattggagttggctcgtgtgattagtgaaaaattcgagaacgtagatgccattgccggtgttgctacaggcgcaatcgctcaaggtgctttagtagccgatttattaggattgccattcgtatacatccgctctacgccaaaagatcatggattggaaaaccttatcgagggagaattgaaaccgggttctaaagtagtgatcatcgaggatttggtatctaccggaggtagtagcttgaaagccgtacaggccgtacgtaactttggttgcgatgtagcgggtatggtagctatctttacctatggattccctgtagcggaagccgctttcaaagacgctaaagtaacattgactacattgagtaactacgacgcagtcttggaagaagctgtccgtacgcattacatcgatgagtctgagatcgcggttcttcaggaatggcgtaaagatccggctaactgggacccgaaataagtaataaacaaaaagacactcaatgactgaagaatttgtgagtgaggtcaaacagatcccacacaatgatgaacgtatcttcacgatgttgtccgatctttccaacttggaacgtatcaaggatcgcatcccgcaagataaaataaaaaattttgagttcgacagcgatacctgtagtttcgctgtcgatcccgttggtaagattaccttccagatcgtagaaagagagccgaataaattaatcaagttcacgacgaccaactctcctgttccccttttcttgtggatacaattgaaacaggtggccgaggacgacacacggttaaaaatcacggttcgtgccgatctgaatccgttcttgaaaccaatggtatcgaaacctttgcaagaggctgtggataaaatctcgaccgttatcgcctccttgccttattaattcctttttcattatggctcagaaactttgggaaaaaaatgtacaggtagatcatgaagtagatatattcacggtaggtaaggaccgtgagatggatatttacctcgctaaatatgacgtattaggctctatggcgcatatcacgatgctggaaagtatcggtttgttgaccaaagaggaactaaacgtcttattagcagaattacggaatatatacgccgtagcggatcgtggagaattcatcatcgaggaaggcatcgaggatgtgcactcgcaagtggaactcatgcttacacgtcgtttgggcgatatgggcaagaagatccatagcgggcgttcccgtaatgatcaggtcttattggatctgaagcttttcacccgttcgcaaatacaggaattggttgagttggtttccggcttgttcgacgttttgatctcccagagtaaccggtacaaggatgtactgcttcccggatatacgcatttgcaggtagccatgccctcttcgttcggactttggttcggcgcttatgcggagagcttggtagatgatttgcaacttatgcaagccgcataccgtatttgcaaccgcaacccgctgggttccgccgccggatatggttcatccttcccgctaaaccgccagatgactacggatttattaggtttcgactcgctggactacaatgtggtatacgcccagatgggacgtggcaagatggaacgcaccgtagctttcgctatggcgggtatcgccgctacgctctccaagttggcgttcgacgcttgtatgttcaatagccagaactttggcttcattaaactgccggatcagttcacgaccggctccagtatcatgccgcataagaagaatccggatgtatttgagttgacacgtgccaaatgcaataagcttcaaggcttgcctcagcaaatcatcttgatcagcaataatcttccttccggttacttccgggatctccagatcatcaaggaagtcttccttccggctttcgacgagctgaaggattgcttacgcatggtaactcatatgatgcgtgaggtgaaagtaaacgagcatatattggacgatgataaatattctctcttgtttagcgtggaagaagtgaaccgccgtgtcttggccggaatgcctttccgtgacgcttataagcaagtaggtttggatatcgaggccgataaattcattccttcgaagagcgttaaccatacacacgaaggcagtatcggtaatctatgtaatgaatcaatcaccgccatgatgcgtagtgtgataggttctttctctttcgaacggatgaacgaggctgaaaagaaattgatccatggataagataagacggatatttccacttttgatcttgtttacgctattatcttgcgcagatacgatagagactcgtattccctatcgtatcgttagtctagaattggacctcacttatcaagataaggcgttaaatgcaatacaagcttacaagatctacacacaagcaaatatagatcaagatcgtgagcaaacaggttttggaggcgtattggtctatcatggattgtccagtaacggaaccggtgcattctttgcgttcgatgccgcttgtcctcatgaggcatccgctaatgtcatcgtagaggtggacgaatccgccgtatacgccatctgcccgaaatgcggtagtaaatttgaacttttaaacggtatcggcaatccggtggaagggccttgcgctgaggagaaacaagccctcaaacaatatgtcgtcgatacaaacggtaataaaatttacatccataattaaatttttcaccggaaatgtttggtagtataaatatttgtactacctttgcactcgcaaaagagaaacaaacaatgcggaagtagctcagttggtagagcataaccttgccaaggttagggtcgcgggttcgagtcccgtcttccgctcaactcttagagaagaggtggatgctcgaatggtggaatcggtagacacgaaggacttaaaatcctttggccattgcggctgtgcgggttcaagtcccgcttcgagtacgatctaatttaattgcggaagtagctcagttggtagagcataaccttgccaaggttagggtcgcgggttcgagtcccgtcttccgctcgcttccaaaaggcctcgctgttcgaaagaatagcggggctttttatttctaaaatataatcgtatctttatcttcaattaaagtgagggttatggaattacgtactgcgaatgttacccgatatatcatgcctctgcgggaaggcggatcattgcctgctttagcggaggcagacgatgagtttaaatatgtcgttaagttccggggagccggacatgggacaaaagccttgatagccgagttgatcggaggtgagatcgctcgttgcttgggtttccatgtaccggaattggtcttcctgaatcttgacgaggctttcgggcggtcggaaggtgacgaggagatacaagacttactacaagcaagtcaagggctcaatctgggattacattttttatccggagccttgactttcgatccggtagtcaatcgtgtagatcccaaactcgcctcacaagtcgtatggctcgatgctcttttgacaaatatagaccgcacggtccggaatacgaatatgttgatatggaataaagaactttggctcatcgatcatggagcttccttatttttccatttctcatgggtaaattggcaaaaacatgcgatcggccctttcatccatatcaaggatcatgtattattgccacaagcgacgctgctggaggaagtaaacaaagatttcaaacgtatcttaactgaagagaaaattcgtgagatcgtaggtctagtacccgacgattggttgcattggaacgatagtcccggtacgcctcaagagatacgtgatgtatatatccggttcttaattgaccgaatcgcccattctgacacgtttataaatgaagctcgacatgcaagacaaacacttatatgaatatgccgtaatccgtatcgtaccgaaaatcgaacgggaggagtttatcaatgtaggccttatcatgttctgtaaacggcctaaattcatcaaggctcgctatcatgtagacgaggagaaacttcgtctgttcacatcagatatagataaagaatctttgtgtacgaatctccacgttttcgataagatatgttccggtacgaaggatggaggtcctatagccagcctagatattccggagcgctttcgttggcttaccgccataagaagtgcctctatccaaacctcgcgtccacatcccggtttttccaacgatctagaacagacatttgagagattatttcaagaattagtcttatagataataaacataaatctccgtatcacgataaaagaaaaaagacggatcgtccaaacaacccgtctttccttatagaactaatagatattatacttatcctcttaagtccgcatccatagcagcggcagccttacgaccgtctcccatcgccagaatcacggtagctccaccacgaacgatgtcaccaccggcatacacatcgcctaaagcggagcgcatactgtcttcctccactacgatcgtacccttcttgctcacctccaagcctccaaaggcacggggtattaatggattcggagatacaccgacgctgacgatcacctcatccacatcaattgtttcgatagcgccctcgataggtaccggacgacggcgaccagaggcatccggctcgcccaattccatcttctgcaaacgcatctgtttcacacggcctctttcatctcctatatattcaatcggattatgaagcgtcaagaactctacaccttcttccttcgcatgtttcacctcttccaaacgagcgggcatctcctcctcgctacgacggtagacaatcatagcacgctcagcgcccagacggcgagcagtacggacagagtccatagctgtattgccacctccgatcacggccaccttcttcccttgtagcaccggcgtatcactttccggattcgccgcatccattaagtttacacgggtcaaatactcgttggacgacatcacgcccacaaagttctcacccggaatgttcataaagttaggcagaccggcgccacttgccacgaacacgcccttaaagccatccgcatgcaaatcatcataactgatcgtcttacccacgatacaatctttctcaaactgtacgcccatcttacgaaggccatcaatctccacgtccacgatcttattcggtaggcggaactccgggataccatatttcaatacaccaccgatctcatgcaatgcctcgaacacagtcacatcatatccacgcttcgccatatctccggcaaaagacaatccggcaggaccggaacctaccacggcaatcttgataccgttcttctccgcaatctccggaaccgagatattaccgctctcacgttcgtaatcagcggcgaaacgttccaagtagccaatggcaaccgcttccttacccattttcaaatggatacacttgctctcacattgtttctcctgcggacatacacgaccgcaaacagcgggcagggcacttgtctccttcaaagtcttagctgcctccaagaattccccacgctcgatattcttgataaaagtaggtatattgatatttaccggacatccctgcatacaagtaggattcggacaatccagacagcgctcggcctcttgcatagcctgttcttttgtcaagcctaagttaacttcctccaaacgggtacgactccggtattccgggtccaactcgttcatcttcacacgggggatatccgcacgttctttatttttcttgcttttgcgaagcgcctcccgccaaggttcggcacgacgagcagcgattaattcttctgttgtcatgattcaattacgtggtttcattatttcttctctatatctttataagcgccgaggcgcatgatcatctcatcaaaatccacttgatgagcatcgaactccggtccgtccacacaaacgaacttggtcttcccgcctaccgtgatccggcaagcaccacacatacccgttccgtccaccatgatcgtattcaaggaagctacggtaggaatctcgtatttctttgtaagagcggaaacgaatttcatcataatggccggaccgatcgtaacgcataaatccaccttctcccggttgatcacgctctccacaccattcgtcaccaagcctttcgtaccatacgatccgtcatcggtcatgataattacctcatccgagttttggcgcatctgctcctcaaggatcaccaagtccttggtacgggccgccaatacgacgatcacacggtttcccgccttatggaaagcctccacgatcggcaacaacggagcgacacctacgccaccaccggcacaaacaaccgttccaaccttctcgatatgggtagcctgccctaacggacccaccacatccgtgatatagtcaccctcgttcaattcacagatcttacgggatgagccgcctaccgcttggatcaccaaggtgatggtacctttctcggtatccgccccggcaatggtaagaggtatacgttcgcctttatcgccaaccttcacgatcacgaagtgaccggccttgcgggagcgggcgatcaaaggagcctcgacttccagcttcaccacgttggctgagaaatgttctttacttacaatcttattcattataatcgctactgttgatagtttgtcttgttttgctggcaaaaataagataaaaaagtgaatatagccctattttccttaacaaaaggctttattcaaacaaaccttcatcacgcactaacatcaaaatagcggaatgagggacaatcaagaacttttcgtcattaaaattgatctcgtaagcggcattctgcaaatagacagccaaatcaccttcacgggcttgaagcggcaagtattgcacctcctcccctttctttttctcccagacctcatgctcctcagattgagaaggcaacggatatccgggccccgtctttatgatataacccgcttgtatcttctccccttgttgaaccgagggaggcagatacaatccggtcttcgtctggctctgtggattcttaggcttaatcaatactttatcgcctatcatcaggaatttatcgatgtctttttgatctatggatagttgcatgattataagatgttaaatttttatttcgcgaacttacggaaagtttaccgaacaaaaaaccctgttcgttgaataaatccgctcgttcacagattatattttcctaagtttttcccttgatttacatttgcactgttagaacttgtgaaagccataacaatccggttcatcatacagaccggcagaataggtaaacattaaggaaaagggcactttcgggtgccctttctcatttatccccatcagaaaacaatcggattctatcaaaagttgttcaccgataaaaaacacgatttcacagaataaatccgcccattcactgacttttattgctcagactctaaacaaactttaatattgaacctagtttactatactttattaacctattttattatgaaacacagacatgcgatctttagaagcaggctgggactagctttatgctttatgttggcaggcggtgctatcataccgcaaagttccgtattaaaagcggaaacctccgttacgcaacaatcccggaaaataacgggtacgatcaccgacgctaaaggagagcccctattaggtgttaacgtagtcgtaaagggtaccacgaacggaacgatcaccgatctggatggtaaatacgtattagaagtagagccgaatgccattctggtcatctcttacatcgggtacgtaactcaacaaacacctgcaagcgggaacgtcatgaacattaccttaaaggaagacacccaaaatctagacgaggtagtcgttgtcggttacggtacccaacagaaaaaggacatcacaggttccgtagcggttatcgataccgaagagctattggcgtcttccggttcttccgccacacaacagttgcaaggtaaagcggcgggcgtaaacatcggtacctccggtgctcccggttcagccacgatggtacgcatccgaggtattaattccatcaatgacaacggacctttgtatgttatcgatggcgtatccactcgtgaccaagacctaagctctatcaatcccaatgacatcgagagtatgcaagtattgaaagacgcctcttccgctgcgatctacggagcgcaagcagcgaatggcgtcattttgatcacgaccaagaaagggacaaaaacgggacaaccgagattaacctatgacggatattacggtttctctaaaacaggtaaacgctatgacgtcttaaacgcttatgaccgtattgatgttgaatggcaagcctcgaaaaacaatctggacctaacgggagctagcgccaacggagaattaccttaccaccagcaatttggaagcacttccgactcttgggttaatcatctacccaattacatgaccgtaaccggcgccggtggtagcacctccatcgatcctagcgattacgatcaagcgaacaacgtagtctatgcgcccgtaggcgatacgaactggtgggatgaaatcagccaactcggttggatgcaaaatcaccagttgtccttgtctggaggtaccgataaagggcaatacaccatgagcatgaactatttcgaccagcaaggtaccgctatcgaatcttatttcacacgctatcaagcacgtgctaattcatcgtataacgtccgcccatggttgcgattcggagagaacctaacttatagttttagcaaaaacaacggacttagcttctcaggtacagagtccaacatctactcatggacttatcgggcctctccttatgtaccggtttatgactatgcgggcaattatgcaggctccttattcgccgggaccggcaatttccagaatcctgtagctattcgtgaaagaaataaggataattatgccactacccaacgtgtatttggcaacgtgtatggagaagcagacctatggaccgggctgacttttaaaacaaacttcggtatcgattatcgtaatgattattcttactcgatgaccaagaacaacccggagttctccgagtccggtggccaaaataatttctacgaaagtaattacttcaattatcgttgggtttggaccaatacgctatctttcagccggacattcaatgagatccattccttgaacatcttattgggaacagaggctattcgggatggtttaggcagatccctcaacgcacgtagatataactatttattcgaagacaataccaatacatacaccttggatatgggcgagaacaatagccaacgtaccaactcttccacttacaatggagaattcgcgctatttggtatgtttgcccgtgcagactatggatataaggataagtatctattaaccggtattatccgccgggacggtgtttcccgtttctcggaaagtaatcgttacggagtctttccttctatctccgccggttggcgtatgtcagaggaggcatttatggaaccaagccgagattggctggacgacttaaagatacgagccggttacggcgtcacgggtaactcagagattcctgtcgcgactaatttcgccaatttgttcacgaccagcacctcctatacgaattacgacatgaccggagcgaacaatagcgagacaaccggattccgcctcagtacctacggtaacactgatacgaaatgggaaatgaccaagatggtcaacttgggtctggacgcgaccttccagaatggtaaattgagcggttcattcgaatggtatacgaagaagacatccaatatgttgatacaagcggcctacacctcgatggccggagaatccggaagcccttatatcaacttcggagatataaagaacaccggtttcgacttcatgtttaattaccgtgaccgaaaaggagactgggcatgggatctatccttgaatttatcccattataaaaatgaggtcttgaaactcgcggaagctgacgattattctctatgggctagcggtacgcgcatcgaaggatacgtaacccgtacgacaaaaggacatgccgtgtctgaattctgggggttgaagcaaaatggtttttatgagtccgtagccgatgttatggcaaccaagccatttggacaaagtgatatcacagaggcagacgctgccgcttatgtcggccgcttccgtttcgaggacttgaacggagacggcaaattggatgatagcgaccggacctttatcggctctcctcatccggacttaaccggaggcctcaacgccacgttaacatggaaaaactgggactttactatgttctggaacttctctatcggcaatgacttatataataacacaaaatattttaccgatttctggactttcaacggtaataaatcctcacgcctcagagatcaatcatggacattgaatggcgataacagtaatgctatccttcctatgctgaatacggaagataactattccggagcttattctagctcttattacgtagaagacgcctccttcttacgcctgaaaaatctcgtattgggatattccttgccaaaggaattactcaagaaggccggtatccagaatctccgcctgtacttacaagccgagaatatccttacgatcaccggatatacaggcttagacccagagtttaccaacgcttatttacggcaaagcgattctgacaacgatggagccggacgtgtagacttaaaaagaggagtcgatatgggaggctggccaacaaccatgcggttcttattgggcgtgaattttactttctaaatccattttataataaaaacgactagtatgagacataaaatattaatagtaagcgcagctgctttatttaccttgagttcttgcggtgaagatttcctgtataaagctcctcaaggcagtattgaccaagaagcattaacaaacgcagaaggggttgagttattggtggtcaacgcttatgccggtttgacccggccgaccggatatgacaatatgttcaactgggtattcggcggtgtatacggaggtgacgccaataaaggctccgaatccaatgaccaatccgtattgaactccgtagagacgtatgctgtcaccgccacaaacgattatttactgaataagtggaaagacgcgtattatggagcacaacgttgcaacttagcgctcaatgtgatgaaagaagcggcagatatggacgagacgaccaaggccaaccggaccgcggagctgaaattcttacgtgccctattcatgttcgaaggggtaaagattttcggaccgaccggcatgccctatatcgatgagacgatcgccgctgaagaaaacgatccgaaagttcataacggtacggatatctatcctaatattttagcagacgtagaagcggccattgaaggattgcccgaaaaacagaccgaagtggcacgtcctacgaaaacagcggcaaaagcgttaaaggctaaaatactgatgcagcaaggtgatatggcagccgccaaacccatcttggccgatattatcgcaaacggattaagtcctaaaggagagagattggccttacaagatgatctggacgcaaattttaacgcaactaccgaaaatgggaaagagtctatctttgaggtacaattctctgtcggagccaataataacgggaattacggatttttactgaattatcctcataacacaggccccggtggatgttgcggattttatcaaccctcttacgaattggtaaactcattccaagtagacgaaaatgggcttccttatcttgagggagagtacagaaataaaaaatccgtgacagaacgtgttaccgattatgattacatctctaagaatgataagacgatcgccgtagaccctcgtctagatttcgccgtaggacgtatggagattccttataaagattggggattgcccgctaatgattgggtacgaaatgtaagcagcggtggggtattcctacccaaaaagcatgtctatagcaaagcggaacaggatgccggattagctggctccacctattcatccggctgggctcccggttctgccatgaatttacaatatctatgcctacgtgattgtaaattgttatatgcggaatgcctagcgaacgacggagaattaagtgccgccatgcagcaagtaaacgatatccgtgaacgtgcagccaaaccggacaatatcatttatttggaagacggaacgcctgccgccaattatttggtgaaaccttatccatccagtcacgccgcattcagcaacaaggaaacttgtatcaaggcgattcatatggaacgtaagctggaacttgcgatggaaggacaacgatttttcgatctggttcgttggggaggtgattatatgaacaaggaattgacggcatatataaattatgagaagcaatacctaactaaattctatggtgtatccgctccaaccgcttctaagacgatgttcccgattcccgagacagagatccagaccgcaggaaacgatgagaacggccaagcttatctggtacaaaatgatgcttggaaatagtccaatctcatccttcttataaacagaaaggcgggcttcccgaaagaaagtccgccttcacgattctttgtatctacattaaatagaacgtcccttgaacacattcgactcgctcgaaggatagagatttcccgtaaaggatatacggttgctattaaagttaggtgataccgtggcagtacatttattcgtacctttcgccatacggaacgtaaccctagcggataccgctacaccctgcacattcatctcgtacataacgtttccttttttgtcagtcttcatctgtacaccggaagttgttccatcaaccgttatacctcctattccgttaggaccggccgccggagtattaaacgctaactgaatggtagccttctcacccttcaccgaaacgaagttcgtgttcggagtaacataaacaaaactaccgcgcttaaactctatacgatccgcttccaatacgaaatccttattcttcaaagcttgcaccgcttgttcaaacaatgcgttagcctcggcttcctccgcagctttcttcgctgccttctctgctttctttgcttctttctcagcctgcttcgcagctttctccgctgacttgtcctgctgtgccatcatcgaccctgcaccaaataataaaacggcgagcaataatacaatcttcttcatattaactcatttttaaaggtttgtctataaaagtacttttatacatacaataaaaatacaattaacatcgacataagttcatctttaacccttatttttcacgtttttaacatgataccataaaaagccccatgcggttaccgccgcaatgaaatcggagaaaggttgcgctagccaaacgccatccaatccccagatcggaggaaatagcaggatagccggtatcaggaataaaacctgccgacttagactcagaaacatcgctttccatgcgacaccgatactttgaaaaaactggctgatcgtaatctgggaaccgacaacgaaaaagaccagcatcgtcagacgtaatccattgtccgtaatcgacaccaattcggcatccgtcgagaatacgctaacgatcagtctagggaataataaactgacgatacatcctacccctgtaatcaaggtcgatactataatagacaaccgcaaggtagccaatacccggtcatgatgcccagcgccatgattaaacccgacaatcggttgcatcccttgggcgataccgataatcaacataaccagcagcatggcgatactggaaataataccgctggcaccaatcgccaaatcgcctccattctctttcaacgcatggttcatgatcaccacaaccacactgcccgccagctgcatggaaaatggagacatgccgatcgtaaatatattccaaataatgggacctttcaaccggaaatatttcgtatggaaacgtacgatactatccttgctgataaaatgactcatcacgaaagcggcaccggcagccatggagatcaccgtagcgatagcggcaccctgtatccccatatccagccaaaagataaagatcggatctaggatcacgttcaagacggcaccgatcatcatcgtgaacatcgcctttttcggatatccggaagcacgcatcacggcattaaagctaaagcttaatgtagccagcaaattacccgggatagcgatatataaatagtctttcgcataaggtatcgtctgctcgcttcccccgaaccacattaacaaatcatccaagaaaatcatactggggataatcgtcaaggctccgataatgaatgtcaaagtgaaagcgtttcctaatacgttatctgccagatcattcgccttacggcctagatgaatggagacccttgtagcggctcccgcaccgatcaacattccaaatgcctgcataaagagtagtatcgggaaagtcaaagtcaatccggagatagctagcgcacccactccttgtccgataaatatacgatctacgatattataaagagcattaaccatggtcccgataacggcgggaatcgcataatgtaccaacaaacggcctatattctcattttccagccgccatgtaatctcatttgacatatataacttatgatttatgaattatgattgagatcatctccgccacacttcctacgattctcgtgccctcttccgcagggaactgaatacgcaggctatccggagcattacaataaacacttatataatcctcgctaaccgacgagggcttaaagccattccggatcaaggcattcccaacccaataagaagtcataaaatcccccgcaaccccaataagctttgttggagctaccgtattcaatttcccggtattcggatcaaacacgattccttccttactgaagaacgtctcaaacgctcctcccataatcaggtcttccggcgttccgcaagccatcggacgttttttctcttgcagccacaggcaatcccccagctggatcgccaaatcaagatcatgcgtcgatagcagaatcgctttttgttgctctaccgctaaagtatgtaacaagaccatagtctctatccgacttgtcacatctaaaaaggccgtcggctcatccaacaatatgatggggcattgctgtgccagcgctttggcgatcatggctttctgacgctcgccatcactaagttccgacacataattataagccttatgagcgataccggcggcagcaagcgattcctcgataatcctgcgatcttcctgccttaattgtccgaaaaagccggtatagggatgtcttcctaaagagaccaactcgtaaaccgttattccaccggcatttgtcttctctgtcaagacaactcccaccaaccgtgagaaattaccttgtgaataagaattcagcggcttccccattagctcgatttctcctcccagaggaggttgaaaaccacataatgtcctcaataaggtagactttcccgctccatttaatccgagaagacaggtcacttcacccggatatagattcagatccaacgcatcatgcacgcgctttttctgtccgcctttcaatatatacccaatacttaaatcacttgtctttatcacagggatccgttccatagccactaattaaaatattgaatatttttccggttcacgattacgtaaataataacaggcgccccaagcataggggtaacggcattcaatggcaggatcgtattactgcccggtaccaccatcagcatattacatagaagagcaacgcaggaacctgtcagcattgtaactggcaccaacatcttatgattggaagagcctaacatcaaccgggcgatatgtggaactgctaatccgacaaaggaaatggggccgcaaaaagcagtagttgtagccgttaatactcccgtacacaaaagaatcgcaatccgtgttcgtttgatccggatacctaaattagcggcatacatttctcccaataataaggcattcaaaggcttgatcagcaagatcgctaataacagcccgattaacgcacaagttccaaagaatggtaattgttccaaggatacaccggaaaaattaccaagcccccacatcacgaacgcatgtacccggtctgtagatgaataataattcaagatagaaataaccgaagaagctagatagccaatcatgattccgataatcagaagcatgacattattcttcacttttgccgaaaaatagataatcagtcccagtatcacgcaagcccccacaaaggccgcaaggattaccgccatatatccgctgatcggccaatccgtgaactgccccaacgtaccaccgaaatagagcatgatagcggctactccaagattagcgccatcactaatgcccaatatggaaggtcccgccaacggattccggaacaatgtctgtaatagcaacccgctggtagccaaggaagcccccgccaataatgcggttatagcctgaggcaaacgagattgcaacacaatattctgccatgcgatcttatcagatcccttccccagcaaaatatccatcacgtgatccaaaggaatcggtacggccccatacgccagccccccaacaaaaagccccaaaagaaccacccctaataacggataaaaaagtagcgcttgtttgttcatggcgcaaaggtatacaaaaaagcggagttatacagtgaatggtaaatcaataaaaaggccatcccttacagtaagagatggcctaaattattcttagttatccgattcttttattttgagaatgccgcataacccggattctgttttaagttcggattcacctgccaagcatcctgcgatacaggtaacaacttcaagtagtcatcagctttacgctcacaattagattgcggccacattcctgtagtgaaacatccgaaacggatatcatcctgacgggaataaacctcccacgctaattccaaacgacgttccaattgtacttccttcaaagttacagtcgcataattatggtcgctattgccatatcctctctcacgaatcgtattcaccaaagcggtagcttcactaacacttccccctccgcgtaacaaagcttcagctttcattaaatagatatccgccaaacggaaaatatggaaatcatttcccatagaacttgtcaaatccgaagcgaactcccacttgaagcaacgagctccatcatgctgttccacggcactccaattggttccatcatattccatgcccggaatcatgttcacatcgatcgtatggttcaattcgttgttatgatcggtcataatcggcttgcctgttgatttgtctatcatcaagccagtcaagaacgtaccgtccaagcgagcgtcttcctcatcgaacaaacgtacatactccggttgagcgcaaataccattccaagtaccactagcggtaatacccaaagacagataatctttataatgcaacgtattattgtgcaactcattcttcacgtttccatcattacccgtatcactgctagagaacgtagcggccaagatagcctcctttgaattctcatttgtcacggagaagttgtctttccaattaggctctaagatatatcccatagccatcaccttatcacagttatcgataactttctgataagcgttaccggagaacgtaaccccccaagcctcagcgttcagatacagttttgccaacaatgaataagcggcaccctgcgtaaatgaaccataattctcagttgtagccggaggacagatatccttgatttcctctacttcctgaatcaaccaatcaaatacttcctgacgggaagaattccccgggaatactttatccgtagggtggaactccgtcagcaaaggaatatttccccaataatccatcatcacatagatccagaaagcacggacaccacgcaagtctgccacgtcttgagccttctcctcttcggtaaggatctctgagttctgcaatttacggatagcctcgttacaagtaccaatcgcttctgtggccgctttccatgcgcttttaactcttgaggtctgagaggtccatgtatgcatatagatttcccggtattgaccaccatcataccagtcaccacctcgacgagtcggagtcacagccatagaaccggagcattcggacaaatgcatatactctgtccaaaacttcttcatcgtattatgtgagttaccgatcaaagcattcaactcggccgttgactggccaaaatcatcagcgggcaacttgtcatatactgtttcatccaagtccatacaggaagaaagtcctcctaataaaaacaatccagttataaatgataatatagttttccgtttcataataagcttatctttttaattagaatgttaagttaacaccaaatgtaaatgaacgtgccttcggcatgtagttacgaggttcaatacccggagacaaacctgcgttgtcatcgctagcctcaccacggaaattctcaacttctggatccaatcctttataacctgtaatcacgaatagattctgaccggctacatataagcgagccttatccaaccaatcgattttcttcgtattgaatgtataaccaatcgataagttatccaatcgcaagaatgaagcgttttctacataataagaacatacacgagagttttcacttaatgtcaacagattatcgttatccattacattcgttccatcgatatatgtattattaccgtaagctgccaatgggttgttcaataccttattgccaattgttccacggaagaagaaacttgcgtcccagtttttccagttgaatgtgttattccaaccatatgtcaaatcaggttgagcgtcaccaacatacgtacggtcatcatccgtgatctgtccgtcaccatttatatcctcaatgataaatttaccattctcatcaaggccattacatttcagcatgaagaactgtccgaccgggcgaccttcctcaactacgtgtgaagtcacacctgaagcaccgcgaatccaaggatcacccacgtaaacacgtcccgtagagaacaattcattagacagttttgtgatctcattcttgttatgagcaagattgagagaggttgtccacgtaaagtccttattacggatcacgtctaagttcaataagatctcaacacctgtattcttcatatcacctacattcgcttgaatctgattgtatacgtaagtaggagtagaaacctcatagttgtaaagcatatctttcgtacgcttgtcgtaccattcgatcgtaccgctcaaacgactattgaacaaggtgaagtccaaaccgatatttaacatagcagtctgctcccatttcaagttcgggttcgcgttctgtgaaggacggaaagctgtcggccaagatccgttgttataataagtaccagaagctgaatacaaatccaatgacttataaggtctcaaaccatcttggttaccggtaattccgtaacctgcacgtaatttcaaatcattgatccacttcgtatctttcatgaaagactcttggctgataccccaagcagcggaaactgaagggaaagtaccccacttatggttagcaccgaatttggaagaaccatctcggcgaaccgtagccgtaatcatataccgctctttaaagctataatgcgcacgagcgaacaaagagatcagtttatattcattccggctggaagtaacattaccgatcttcagcaagtttccggattggatattatcagcgcccatcgatcctacggcgaaattcgtagcctccgatttctggtcggcgtacaagttattttcccaagaataaccaacgatagcatcgaccttatgctcctctgccgagccaaaagctttcgtataattagcggtccactctaacaagttacgatcccatagtctattacgacggattgccttacccgtatcaccctgtccacgagagttccgaggatcttgccattcgctatagtcagatgagaaacggctcttatacaggttcaccttggttgtcagtccatccaaaatagagaactgtacatcaccttgtccatagaagtagttattagctgctttcttatagttctgatcttggttctgaaccgggttaccttgatcataattgtggttggcatccgtgaaataagagccgtccgcattataaaccggataaaccggaagcatattgtaagccaagatatagtcatcagaaaacggcatctgcatatccgtcagcgttgcggcacccgttaatccaatacgtaaacggtcgttgatagcacgttgctggaactggaaacggaagctatgacgagtcatgtagttatcgcgagccacaccgttacgatccaagaaagtataagaagcacgataattactcttagaagaaccacccgacaaagaaagagcgtgttgttgagaaacacctacacgagtcatctcatcgaaccaatccgtgtccgagttgtacttatcataagtagagatatctttacccaacgccttattagcggcacgccactcagaagcgttcaacatgtcgggcttgttcgcaatggtagaggcggtaagataaccatcataattgatctgggttctggaaccggaacctctcttcgttgtgatcaagattacaccaccagcggcacgagaaccgtaaatagcggcagaagaagcatctttcaatacagagattgactcaatatccgaaggtgatacagtagacatatcaccacccggaacaccatcgatcacgatcatcgggccttggtcgttctgcaaggtagaagtaccacgtaattgaatctgggaactacgagttacatcaccggaaccagacgtaatagtcagacccgctaccttaccttgcagcaagtcggacgcgtcacgattcactcctttattaaaattttcctcggaaatgttcgctacggaaccggtaatctccctacgagtctgcgtaccataaccgatagctacaacctctcccagattcacgacagaggcaccaagcttaacatctacggcagagcgccctttcacagcttcctctaccgagttgtaaccgataaaagacacttggagaattgcttttttcaggtcattcacactaagggtgtagttaccgtcaatatcagtgatggtaccgttggtagtacctttttccacgatattcgccccgataataggctcacctagttcgtccagaacttttcctttaacagcgccagactgggcaaaagcggctgtcatgcaaaaagacattaacacggaaagtatggctacattccagtgtttgaaagaatcaaagattttctttcgttgcataattacttaatttttaggttaacgatcatttaattcacaaatacaattgagaatttccatggcaaatgtaacttaattttttaaaataaactatgattatgtaaaaaagtaaggaaaatcaaacaggaggtctttcggtagatcaaaataaatgtcaacggataaacctaaagagtgacgttttcatttcgataagccacttatagtgacacatccttttccccgacaggctcatctacaaacataaataaggagaaaatcgtttctttagtggttttaaggtagaaaaagagtacttttccctcgattacaaccctgttgtaagatacttacagtagtattataaggtacttacggtagtgttgtagcatacttccgactgtgattcgcatcacttccgaatgaaaaaccaatcacttccgaataaaaaagcctccttttacttgttaagcaagaaatagaggctctctttttcgctggaagaaaagggagggaaacgatatacatctacaagacaaggtgttgccattattttcattcaatttcggaagccttacgcccataagcccggaaaaatcgattctccgggactttaaaatacaaaatgtcaatttgtcaatctccctttatccttgtctatagttctggacggactacgctaaaatctatctctccatcctctccttctcctttatcaacccattccgataggcgtaaagaagtttctccaagtccttgatctggctttgaagatccgcacccttatccgtatctttcaccatctggcgatgggagcttaattctaccacgatcgtggtggatttgatatccaagccttcctcgatcgctttcgcccgggattcgaagggttcgtgttgcacaagctggaaaccacgggagtgatatactaatgtatagcccgcgataccggtttccaaatgatacggacgggagaaaccgccatcgattaccaacatcttgccattcgccttaatgggattctcaccttgattggaacggacagggacatgtccgttgatgatatgccgatgcataccggtcaccccaaactcatccaatatcttatcacaaatttcctcttgctctcgtaacgtataataagcgcctttttcctccttatgagtctcggcctcttcgataaaggcacgctcgaaagtagccatcttgcttttatcgaataacggggagtccttgccgccccaaagataccagatataatcatgcgcatattccacttcttcctgttccccggtcttgaaataagccgtacggatcagttggtctacacggtccaacaaagcacggcccttataatcctgccccaagatacgtactgacttaaatgtaccatccggattcatcgggatagaggcatgaaacagtaaattggaattacaaacctgatacattcccccatgccggaagaaacaacgcatatgctttttcatcttctcgctgctctcaaaagaatgcaatatctttcggatcaaatcctcttcctcaatagaaagacgatacggatctttcgggtctaaagtaggccagttagtatctttaagcgtataatcctttccatcgatatgaaccactccccgcttcagatcgatatggtgcaacaacatccggtcatccatctcaaactccggacgacggcggatgatctcaccctccagcttgaactggatgatggtgatcgccttgtgcatctgggcgatcaaacgggtggtcttctcatccattgcattatcggcgaactttgttttcggcatgaataacgcgcaaggatcatccccatacgcctccatcgcgaaagtggccaacggcaaaagattgataccatatccatcttctaaggtagccatattaccaaagcgtaaacacatacgaatcacgttggcgatacttaccaaattaccggaagcggctcccatccacaagatatcatgattaccccattgaacatcgaaattatggtaatcgcaaaggatatccatgatcagatgagcgcccggaccccgatcgtaaatatcgccgatgatatgtaacaggtcgattgtcaaccgttggatcaagttacacatagcgataatgaaatcgtccgcacgtcccgtggagatgatcgtacaaataatctgatccacataagcggatttattcggctctacggaagactcgtgcaataactcctgaataatataggagaactccttgggtaaagccttacgtactttcgaacgggtgtatttggaggacacgttccggcaaacacgtaccaattgattcaaggtaacttgataccaatcttccagatcttgctcttggctcttgatcagttccagcttatcctccggataataaatcaaggaacaaagctccttcttctcggattcccggagcgtattactgaaaatctcgttcaccttgcgctttacggcaccggaagcgtttctcagcacatggctaaaggcttgatcctcgccatgcaaatcactcaagaagtgctccgtacccttcggtaggttcaagatcgcctccagattaatgatctccgtactggcatccgcgatcgtcgggaaactccgtgccaacaattgcaaataccgtaaatcgttttgtacagattcggctataatatcttttgtcatcttatctcttatttatacgcgaatataaatagatccggtcatttaaaccgaacctgctccggtttatttttctcggctacttgctggatctcataggggctgacctctacggcacctttcgtcaattccggaatattgtaggaatacaactgatagtcatacttatccggatcttcttgaggcaataagaacggtttcgaaggcttaccgtctttccctatatgacaaatataaggtaaagtatataaaccgttatcccggcggctactaaatacgacccaatcactattactactccaagaatgatagctatccgtatccgggctattcaacgcagacatatccatcgctgtccgattctccaaatccatcatccggatctccgcatccgggtgccaaatagggaactgcccataagcggtttccgtgtacatcaggaaacgtccatcgggagagatacggggaaatgtatagctcaagctatccgcatgtaccaacgtatcgatcgggaagctgatctcgccacgatccggatcaaacgcaacacgacagagattataacgtaccttatcataattctccggcatcttctgggccggggccgtacagaaataaagccatttaccatccggagagaacgcagggaaagtctcgaatgcatcttttgtgatcaatgaggctttcgaaaggatttctttgtttttcacgtcatacaccaccacatcggactccaagtcgaacacttccatctttttctctttcacggaatggaaaaactgtttgatatcatttaccgatgtggtgatatagcgcccggaaggatgccagaaaggatacgtcatattactgatcgtcccattcgttttcgtattcaatttactgattttcttgtcttggacaatataagttcccccattcgccgcacgcatatggaacatcatctgccccgggtctcccatacaaaaagaatggcagttcatacaattatagccagtcatatcgttacggataatcggctgttcgtcaaacgactccaaattccgctgataaatacccacaatatgccatttctcgtatcccggctctatcaaacggtatactaaatgagagtcgatcgcttgatcactgatatagacagagaatggtgcccatttagtccattcgtctccctctttcgtcgtgatcgttacaaaaaaggctttacctttattcgcacgggtaagccgttcccaatccttggacttaaaacagatcgtattcgttccgtaatactcaaacaccccctgctcgctaccctcgatcttcgcatagcatttttcagcgggcacgtcaatacggaaattcaatggggctatattataaggtatagtaaccccttggtaatccgggaacatcggcgggggagacatgcgttcgttctcggcaacaacaaagccacccggatgtaccgcccaaaaacccaagtatagtacaataaccagaacttgcaatagtaaatatccgatcacaaagtttcggacgatctttcgtttcctcgtattatccatcataattattgtcgtttaggagtcggggtaaattgagcgtaataataataggtatcgccaaactgcgctttcaaggcggcaggaggcatgcctcgagccactttcataaattgcagaaagcggttttgtacctccgaactgatcggatagcttttgaacgcctccgggtctttctgcacggcagcgaaaaataggcatatagcctcttgatagagaacgggaaatgactcgcctcgctctttcatcaattccatataatgcataaatgtcatcaagtctttataaaccaacaagtatcccattccatactcaaaagccggacgattatcggcatgatcgtcgatcaagaaagccagcgcattgggaaatgtcaaggtcaagtctaagggattatccgttaccggaagtaccgcccgcttcgcctttatccaatcggtagaggcacaaaccacggagtcgagcaacgggcgctgcgcttttgcccaatccctgtagtggggagtcgattcaaggatcttaatatatttctcggcggcacggtattcgccggttaccagataagtctccaccaaacgcttcatcaaacgaggctgcacgcaacgttgcgagcttaatacacccacaaaggcgaaacgttgcgctgcgtttacctgccctacttgccaagcaacctcgctcgcctcgatcaatcccatccggcttttcggatcgtgcgggataaagccctccaccccgatctgagggaaacgcatcaaatcgccagaaaatcgtcccgtatgtgataaagccagattcaaataaatcagggcatccatatcccggaccgaatgcgcacgagcatgtgagactatctcttgccattctccctgccgtgcatagtaatcgtaccgataggcctgctccatcgggtctttcttatagagaatcccataagtcatcgctatcagaaggaaagcgtaagaaacgattcgcttccaagattccttacggataaaaacccggttccttacataataaagaattaaaacgatcaaaggatatgaaagcccgatatatcctaaagaattaggtatcggatattcgggatggcatagatgtttgctgaagaacgcttcccgcatcggaagaatataaaccgtacgcatggcgatcaacggtagcaaacctccccaagcgatagcgataatggctactccaaaacgagccttatcctctttagcacaacactcataaaccgcgatcaataaggccaataataaattagcgggtgccgcaaaaaaataagagccccccaaaaacaagaagccaaagagataacgaagccaatcaatcttgattgaagtatacaaatacgcaagaacctgcacgaaagcgagcatcgtcaacaaggcgattgactcctgcggatagatccaaattaaaaaagagggaagaatagccgccaacatagaggcacgcaccccacaagcttttaagtaaaggaaaaaacagccggagatcagtcctaataataaagcgatcactaccgaagctccataaggatggataaacgcaagcgataagaactcagtcacatattcattcaatccacccggttcggccaatcggtcttggaaataactaccggtagtctgaaacatcatatactgctccagaaaccgataccaataccgaaaattcaactctatgaataggatacttcctataataaaaaggaatagtataatagtattattgttaacaaatagtctattcttcattctccaactgtttttcggatcgtaaagatagaaagtatatagaagatggcaaaagaaaaggtttaattattatattgaacacggaacacacggagcgtgtgctccatgttcaaagctatatttcttacatctgttgctcgccgccgccggaaccgccgctcttcatatcatcgttgctgatacctctttttactttcttgatggcatctttcaaggtgccaaaacgataagatacactaaccattaacattctcatcgtacggtaattgatctcacgacggaagaaggtatcatcggaagtagtattttccatcttcattcgcttccagaaggggttttggaaagacaactggacagatagctttttcttcaagaaatccttgttcacggagattcccgtgaaatagaatggagagcctttcccctgtaactggatccaaggagagaaatatcctccctgtatgttcacacggaaatccaacgggaaattaaactgcgtaccggcgaaaatacgtccgctgaatccactattcgccatatcattcttttcgctcttcaaatccgtataatccattccaccattcatatagatacggaacaaaggaaccggattccaatttgcgtatacgaataagccggtagattgtttctttccgatattaccgtaggtggtttggaaaacacccggattctccggatcgataaaggtatattgctcgatcgaattattgacgaacgtataagtagcgctcgcgttaatgctgaatttctgggcgaacatactatagttcaagtttatattattacttttctccgagtccagattcgggttaccgaaggatatgttctgtgggtccgcattgtttacataaggattcaaataccagatacccggacgctggatacgcatattatatcccaagcgaagctgttgcgccatactcaattgataagagaccgtagcgtttggcaccacgtcgaaataatgggtatcaaagttcatatcgggagccatctcatatttcacgtccaaagcggttccttccgcacgtacccccgccttcacgccaaacttatcaaacttcatcgaatagcccagataagcggaatagatatgttgggtatgacggaaatggctatctttagaagttatgtcctcccatatattcaacgaatcgttgaaagcggtacgatccgtattactccggctctggcggaatatatattttgcgccaacctccaaggtctgatccttccacgtaggggtcgtataatccacctgcccggtgtgctcgttcgtagaagccttgttgatattattttgcggatagccgagccaaggattgtaattcacgacattctttaattccgtataatccttgttatcattgggagaatggctgaaacggtaggagatcgtcagcaactcatcttttttatgggtagagtgttggtaatccacgctcacgtccgtagaaccaaacgtttccgtagcgtccgaattacgattataatcgtataccggattacgattgatatcctgcatattcaccgtgtattccgaacggttcgtcatcttaccatggaataagttcgcccctacggtcagcaagttcaaggagtcgatctcataactaccttccagcgaaccaaactggaagggtccgttattcttcctacgtccattttgcgtcaagaaatgttgctcgtcattttccaaatcctcacgtatcgaggtagactcattccaaggctccctattataattgtaattataattcgctgtcaacccgaacttacctgctttaagggatatatagccgccaccgcctacacgccccaacgaactaccgttcacacgaaccgtaccagtatatccttgtagagcgtttttcgtcgtaatgatattaataataccaccgataccctcagcgtcatatttagcgcccgggtctgtgatcacctctatgtttttcacggaattggccggcatactcttcaatacctcagctggattgttactcaacaggttagaaggcttgccattcatgtagatcttaaagttcgtggagcctttcaattggatttggtcatctccgtccacggttaccatcggtaccttgcgcagcatttccaatgtattgtttgtctgtgcctccggatcatcttccaagctataggtaagtttatcgatctcagccttcaccaaaggtttctgtgccgtaaccgtcacttcccccagccgctggttatcctcctgcatatacaacttacccaaatccaagttcctctgtttatccgagatcgtaaatgttttctcggcaggagcttttcctatcgattgcatagagatgatgtatttaccggcgctactcaatggtgcctgaaacttaccatccacatcacacgctaaaagcttgaccagcttatcgggggtcttcgctaaagcaattctcaacgtcgcatagggtacggactcgttactcagcgagtctaacacctgtcccttaattgaataggaacctgtcttgtccgcttgcgcatacagaggaagcgcaaagaacagtacccaaaataaggcaaacaatttctctttcatacgttcatctatcactataaaaataatacattttactgcaaattacactatttacgatttcatcgtacaaataaagtcattaataatgttcatatttcctttttcttctaaagaagtctgaaaaaagagtattttttcataatagacggacatcaagtaaaacaggttgcacaataatcctaggaatctttgagaaaacgaatatattgttatttttgcattcgtaattctttaaaatacaatgtcatgagaactatcttttgtgtattagccactttgatgttgggtttgacgagtctgcaagcccagagtttaaaagccattaagttgaatgctcccgacaagacccggggcgcttcggtaatgaaagccttggcagaccgtcactccgagcgcgagtttgccaacaagaaactcagcctacaagatctttccgatttgatgtgggccgctatcggtatcaaccgggaggatgggaaacgtaccgccgcttctgccttgaataagcaagatgtggatgtctacgtattgatggaagagggcgcttatctgtatgatccgaaagcccatcaactgaacccggtagcggaaggcgatcaccgtccactgatcggaggaaagcaaacctccgtgaactcagctcccgcttgtctattgatggtttctgatgtttccaaattcggcaatgtaggtacaccacaattacgtgagcgctttggagccttagatgccgggctggtctctcagaatatcgccttgttctgctccggatgtggcttggtaacggttccccgcggcagcatggaggctgatgctttgaaaaaagtgttgaagctatccgactcccaaatcccgatgatcaatcatccggtaggatacgcgaaataacgtcagcactcacgtaagcccccgagaatcatcttgtgggcttacaagaccgctcacgcaggaggctgagaacaatctttacaaaaaatagatattccgactctccgaatatgatcaaccaattccatattcgtcaatttatgaaaaatagagagatcaaactgataaggtaataataaatcatcaatcgcaaacgcaatctgatttaaccgactacgtgtcaagtttgcccccaccaaagatatatccacgtccgaaaaaggtttatggtttcccttagctcgcgaaccgtaaagtattacttcctcaatatcctcgtatcgagcgtaaaactcacgcaacttattcaattctatgtcactcaatccatatttcatttacagcttcatctagtctcattttccgatatacataacatcctctcttcaaaccggcaaaatagtggataataaaccagtacgatattctcataaatttcagaagccacatcgtcatcataattatgagaagtcaaattacgatcctcaattgtctccatccatcgtttatcttctataagccctatttgtaaagccttacgtatagcatcacgtgaacctcgaatatccgtataaccttgatattccgcataatctttcatcaccttccagactaattcacgggtatattcaaaacgctggattaatccttcttgcaaaagttcatcaacctcgtccgctaattccaaccgccgagatacaatgtccaccgcttgacccaatttagccaaagccttacaataattaggaaatcgctgtaaccaacgtatatcttgtgccatatatgtaaactttaggatacgaagataagaaaaacagaagatattcctacattcatttcttgaaaaatgcaaaccaagcaatcaaagccagcagcacgaatataaccaccaagatcgtattcccccaacgaatcaggaaggaaggcatctcgccaatcatgttgcggactttctcgctacgcaactcgatacggttttgatccgattctgcttttttcttcatctcattgtatgtcgacatatccttaattccccaactctaattgattcttcactaaattataataagcgcctttgcgatcgatcagcacgtcgtgggtgcctacctctacgatacggcctttgtcaagaacgactatttgatcggcattgcgtacggtacttaatcgatgggcgacgattattaccgtcttaccccggtaaaagtccgtcagattctccactatggcacgttcattgttggcatccaacgaattcgtcgcctcatcgaaaaagagataagaagggttcttataaaccgcccgggcgatcaagatccgttgacgctggccttggcttacgccttgaccatccggacctatcaccgtattatattttaagggtaagcgctcgataaattcctctatattggcgatacgagctgccaataataagcgagatttatcaatctcaccgtcatccacggcaatattgcgtgcgatcgattcagagaacagacaaccgtcttgcatcaccgcagcgcattggtcacgccaccataaaaggctgaaagatcgcaaatcatctccacccactcggatatcgccttctaccggattatagtagcccaataataacttgatcaaggttgttttcccgctaccactcgttcctacgatcgccgtaatcttgcctcgaggtattttaaggtttatccgctccaagactttcggcgaatggatgccctcatattgaaacgtcacgttacgaatctcaatgtccctatcgcttccgttaaaaccgattatcatacgttccggcgtctcctcttcttcccgatcatggatctcgctcatccgttccagactaatcttcacgtcttgccaactataaagaaactgcacgaactgttccaccggagcgttcaactgcccgataatatactgtatagccaacatcatacccaacgacaggctacccccgatcacagccgtagcggcaatcaccgtaatcacgatattctttacctcattaatcaagatactgccggcctcctgactctgttgcagccgcatcgattcgatgttcgtccggaacaagtccgcttgtatatcctcccattcccaacggcggcggcgctcacaatgctggagcttgatctcctgcatgccgttcagcatctgcatcgtcttcgactggtttcgagcccgctgctcaaaataggtataatccagcaactggcgtttcttcaagaaaagcgtcacccatatcgcatataaggcactacctagcacgaatatgccaaatatcaatcggttataataaagcaatacccccccaaacacgatgaaactgaaagcggaaaagagcaccgtcaatgtctgcgccgtgagaaaacgctccacccgttcatggtcgtggatacgctgcaacaagtctcccgtcattttcgtatcgaaaaacgacatgggcaaacgcatcaacttaatcaagaaatcggagagcaaggagatattcacccgagcgctaatatgcaataagatccaacggcggataaagtccacggaggcacggctcagcaccagcatcaattgtcccaccaagatcagatagatcaaattcaaattctttccggctatccctttatccacgatcgcttgcgtaagaaacgggaagatcaattgcaagacactacctagcgccagtccgagcaataattggataaagaaacgtttatagggtctcatatatccccacaagaaacggaagggatctttccccgtatgccgttcatctttccgctcgtaaaacgcgggggtcggctgcaaggccatcaatatccctttttcctcccctctcgtacgggtactgatccacgcattacgaaactcatcctcattgatccgtaatagattcttgccgggatcggcaatatagaaaacatattcaccatcccgtttctttttagcgtcatagagtacgacgaagtgatcctggttccaatggaggatacaggggaaagggcgctgctccaccatcttccccagggtcattcgtccacatatcgtacggaatcctatatactcggcggcatcagagatacccaacatagagactccttcccgggtgacgacacaaaggttctgcatcgtcgcggcggaatactccttgccgtggaacttggcgatcatgcgaaggcaggtagcgccgcattccatggagtctggttgtttgatatgggggaagctcataatttaataccttcctctatactatacacatttttccgttctttcattgctttcgacttgtttttacggaatgtataacgaagtaagatccaaggccgaaaagaggcactgatttttcgttgatcgctgtagttctcatagctaccactacgtaattccatcgaggtacgataagtaaccaaacaattctccatcgccacggaaatatagaaatagtccgtaaaattataagagacctgtaccatcgaaaaagaagggctatgatacttcacacgagagattggcgtataggtataattgttatataatatatcagcacccaaataccacttcttataattcgcattgaaatacaaagaggaactaaaccctttcctcgggtcttgattctcataataatccacgacatgatacgcattgacacctatacgccctaaattgcctatccgataagacagacttccccctatgcgtaaattcttatacttcccgctattcctatagctactgatataaatatcctcttcgctgaatccatacgattccaccaagtccgtgctgatccgataagagacgctcggtgtcaaataaaatcctttcgtgttaaatgtcaaggataggttcaatttatgattttggctcggaagcagataaggatttccttgtgtcttcactaaagaatccgtagacatattataaggattcaattcgctctcggtaggagccgtattggtaagcgtgtatcccaatctcgtagatagatgatcgctaaaatcataattaccgcttaaagaaatgcgaggcttgaagtaatgattagaggcctcacccgctttcagccaaattccttccagcccagcagaaagcatataagaaaaacgctttatagactggctatagtccgcatacaaatactcttcccatttctcgtgccggaaagtaggcattcctatactcacttgacgtatacgatcactcgtaaaacgagtctgattccctacattcaagctacctccatttgcaaaatccacattataatccacatcaaaacgaccggaattccggtcgttcttatataaatatgtattcagataagaccaatccagatatgactccgagcgatttccgtcattctcgttatgattcttattgaaagcaagggtcgtttccaatatatggtttttcgcaaacgtatgcttatggaacaagctagccgtaaaaatatacgattgatccttattaaaagaagaataatcgaattcttggggtattccatccgttaaaagtccatcaccccaacctttcttcttattgatttttttattaccatacatatgagctacgatataatccttgtctgtacacatccaacggaattgcaactcacctaaatagctagtaccatccaaacgttcctctcccttcgtccatttactataccccgtatttagctgccgttgctcctgttccgagcgatcatcatacaaatagtccactgaagctcttccataaagtgcgtatcgagagtttccaacctcaaaataccctaccccaagccccttacggaaagggacatcatgccgcgtggctccttccaagaagataaaaggttgtgtcttctttttcaattttatattcaatatcttttggtaaccatcctttaagtaacgggctttcaccacatcgattatctccacggattctatctctctcggatcaagagtggcgattcccgagttataacgattcccgtttatcaatatcaagggttgcgccccatcctccaactgcaccttccggttagccacatccgagtacaagcgtgggatctcttgcagggcccggaaagggtctttcatatttttagccttctctgacagataaaagatctctcccgtagcggtccgattcacttgatcattccgattacccgtcaccattacttcgtccaatacgaccgttttctcaggtgtcagcaagaagtcttttctaacatccctgttttccactcgcaatatttgctcctgcgcattataccccaagaaaaacaaacgtagctcatacgctccctccttcaatccatctatacgaaaatgacctttttcatcagttaaagccatggccgataacgagtcttccacactcaatatcacctgtaccccatccatcatcttccgcttctcgtttgtaattattcctgagaaggtgtaagactgggcagacaatgtgaagaggccttgtgagatgaacagaagccagaaagcgatagttctcatggtattatgcgtataattcttcttttaataattgacatttgaaaagatacatcagatattctttcaaagtcatattgattgcgtcaaatgtacatatattttcccccggatgcaacattatttgtttattacatggtcccaaacaggcaggcagtaatttacaatctatacaattttgaggcaacatctccttcaaccaataagaaacttttgtctcattccaatgtacctgtccggattgtaaatcaaattctcctaacgcattttgatcatcaaaagaagaaatcgtagaacacttaaaaactttaccatcataattaaacaaaacttctctatgccgttcagcaaagcaaacatctccttttggcataatataataatccaataaaaatttcttatctaaaaacttttgaaccgaagcatgtaataacggcacattaactttatctttttctagttgccacacttttttcaaaatgacaaaacaatacttacgatctagaaaatccaaatcaccaatgatttcatctattttctctaatgtcttattatcaaagtttattcttaccgcaagccacctattgggaattttatcattaataagccgaatagttctcaatgtcttctcataagtatcctgattcgggttatccttatctttctttatttgattatgatgtattctatcaccatccaaagtaatttggaattggcattcaaagttttttaaataatctataatagattctgttatcaaaatcgcatttgttgtaaattcagcaattagatccaattgattaacttggcaaaagtttctcgcaaaatccagaatttcttttatccctctgaaatacaaaaaaggctctcccccaaagaatgataattttaatatcctataagatgttttaatatattcttgttctatattcttttttatagcttctattacttcactcttcaagaaacttcccgctattctattctcgtaacagtaccaacagtttaaattgcaatccaatgttgtattcaccatgacttgatacatagaggcatcaaattgcatcctttttttccgaaacaagacaatctctctttcatcaaaatcatcaggaacaatatattgattatccaccaaagatttatataatacaggatcagattgctctaattctaaaatattttcttttttatatttttcatatctcacattatttaataatataaatttattattaaatgaattataaagtaaataaacctgtggcaaaactttctctacaacctgataatatatcttcttcatttcatttttcattaatttctcgatagaaatagctgatgccttctccctgttacaaagaaagcatcaaactaaaaaaactatcaattagccacacctccctgaagaattattgactcctccacacttacctgagccattgttagtaccagaacaacttccatccccattattcggagccttatcatctggatcctctcctccacgaactaaaataagttcattttcctctagcctctctaaaataaggctaggcaaattcattaaatcattcataatatctaaaatttatagtttataataggtcataatctatgaccgtttcatttactattttacttatgactgtctaggattttcttgtggacacagaaccttccgtccatcctcaatccaataccattcgtcagtctcttcatcataatgccattcaccaccttttatagcggaaagttcttccttcgacaacaaatcaccaatttccatgtctatatgcttttttagtctgttacaaaaatataagtaaaatttcgtactctatctaacaaacacctaattttcatctaacaaaaagctaacaaaacgagaaaaacgcatcttttttaagattattcactatcttcacatccaaaataacgaatctatcatgaaacactccttatatattgcggccattatgttgctagtcttaatactctcccaaggatattggctatacaatatatataacgctgaaaaatataaaacgcaagaagtccttgaagagctattcgaagaggctatcaagcaagaaatgtccaagcgaatggttagcaacaaaccgaaagaccccaacaaccccaaaagaatcataagaagagctagtgatatgacaccagaggaacgagccaagctaaaaggggataccataatctggccacaaataaaaaatcggaatctaaaagataactatgccgacctattagcgcaacgtatgcaagacggtctacgtaatgcaaatagacccttaaaaccaaatgtattagacagcctattcaataaaacattaactgatcacaatttacaagcaatatcttatatagaaatatcagactctacccggcaaaccgtaaatacggtaggaaaaaaattcaacctttcattttataagttccaaacagaaaagctcccgataggaacgcagggattacaatatgtacaggctttcgttaaattacctctttctgacattgtccaacgaaagctcttggcttttatcgtatcttgtctaatcatccttacctcggcgagttgcctatattatttattaagaacaatacgtaaagcccacgcccaactccgagaccgtgaaatagccgtacatagcgctatccacgacttgaaatccccgctgaacacggcgtatgcctctatggatcttatcgctagcctagagaatgaaccgatgaaagtgaacatattaaataccggaaaaactcagataaaacagttgatagagatcatcgagtccatgctgtcactattgaaaacagcggatggaaaagagagcacacgaaagtcgcctatagatattaaatcatttattgagcaaacctaccaagcgatagcaaggctctatcctaacaagatccccttgttcaagcttgagaaaagcgaggatttccccgacatgatcgaagctgataccgttcgtttggaacgttgcctccggaatttgctagagaacgcattgaaatattcgaatgacgatgtacgaatcaccgtaacgttgactatgaaaaacaaccattaccgaatagccataaaagacaccggttggggaatccccaagaaagcccagaaaaaactcggacaacaattcttccgggtgaaacaagccgacaagccagcgcaaccgggatatggattaggtttgagtagcgtaatgctaatggctaaagaaatgggcggctccctaacttttcagagtgaggagggtgtcggttcaacatttttcattaacttaccagccgaaaactcataacactatatggaagataaacagaaagtgatctttattgaagatgacccaaaccttggattaatcatcgtattggccttgcaaagtaaaggatacgaggtttgctacgccaacacgttaagcggtattcaagacatgatagaaaaagactgccctaatatcctgcttctcgatctggaagttggcaatcaaaacgcattggattatttgccttttattcgttcaaagcatccttcattgcctgtactgatagcctcttcccacaacgaaggggaggaaataacacgctgctatgaagccggagctaatcattacaccaaaaaaccgtatgatatacaagaaatagatttcctaatccaaaggttttgtaaaaagggcagtccgatatcaaatagtatatctattggagattaccaactggaactctccactcataaattattctataaacaagaacagtcaaaaacattaagtcctaaagatttcaagttattctatctgttatccgagcaattaaatcagccagtaagcagagaaaagctttttcatgaaatatgggatgggcaagaagttcatgatagcctaaacaacagcatctcgcgtttgcgcaaattattggaaaaagataccacactttcaatagatgccgtaaaaggagttggatatatattatcaaaaaaagaccaactctcctcatcgtaattaaggggggcttattgtagatttctagatacgcccttgttccctatcgcatgattcgggaaaaacacgtacgacttttttgaaaaacacctacgacttttccctaaaacacgtacatgttttgagtaaaagatcatcctgtttttaacatactaataatcagcatattatataattcttttcattaccaaacttattgtttggaatttatatcgatcctatagggacgtagcgtgcagcgtttgctacctaaagagttttcattatcttcgcggaaaattaattgagatgtggacgttctttatcatacttccaatcctgtatcttgcagggaatatttatatttatctaaagggaaaacaggctttgaaaagccagtctaccggagttaaagtattgttatccattgttttttggggaggagctttatcattcttcagtagttttctattcaggaatctggatatgccggcttctttcgctcaaacggtttctcaagtagggacaggatggctcgtgttcactttatacatggtattagccctattggtatttgatatcttacgacttttccacctacgtttcaaatactcattctatttatcattattcttaacactcagcttattaggatatggaaactataattaccaacatcctgatacacgagttatcaacatggttatcaacaaaccggccaataccgatggacagccgctgaaggtcgtagccattagcgacatacacttaggatacgctaccaacaagacaatgcttgccggatatgtggatatgataaacgcccaacgcccggacatcgttcttatcggtggagacttgatagacaacagtgtcgcacctctgcgatacgagcatatggaagaggaactgtccaagatctacgccccattaggcgtttatatggtaccgggtaaccatgagtatatcagtggcatagaggagagcgagaaatttatagcgcagacgcccatcgtacttttaagggattccgtggctatcttgcccaatcagatccaactcataggacgggacgaccggcataacaaaggacggaaaactttaggtcagcttactgcgaaccttgataaaagcaaacctgttatcttactagaccatcaaccctacgatttagaaaaaacggaagaggctggcgtagacttacagtttagcggacatacacatcgaggacaagtatggccgatgaactggatcgtggatcatctgttcgaattaagttacgggattaaaaaaatcggaaatagtacgatttatgtctcatccggcttatctttgtggggaccgcctttccgtatcgggacggacagcgagatggtggtgttcaatattacattcaaagagtaaagatgaaagtatttattcaatcgatcgtagcgcagctattactaaatccgtatattttctggagaggatatcaagcgcttcctcctaagaaaagttgccggattccttttatcttgtttttcgtactcgaactatcgctttattttttcggatttatttttaggaatgaactacctgataacgtgataatcacgatccaatacatctgtaacacttggtatatagcgtccatttatatcactttatctctcttggtacttgagttgatcaggctctcccaacgtatcaagccatggttccccaaatggatgaaagggcattggcagcaaaccaagctaaccctgttttttcttatcgtattcggtgttaccggtttaatgattcacgcataccatacggtaatgaatccgattgttaagaacgtatatatcacgttgcccaaagccgcaggggatcgggatagcctgactattgtcatgatgagcgacttacatatcggagaggttatcgggaaggacttggtacaaaaatatgtggcgctcagcaacgcacagcatccggatatggtggtattagcgggggatattatggattatgaatcccggttcgcggaaaacgcccacatagaggatgatttaaaacaattaaaagctccgttgggagtatatatcatttacgggaatcatgaataccgggcaaaccggaacgcgaaatatcgttggctgcaaaagaccggaggtacgctactaatagactcggtggtccaaccggactcaactttttatttgatagggagggatgatttcatccataagaaacgaaaatcgcttcattcgttaatggaaggggtggataccggcaaaccgattatcgttttggatcatcaaccttggtcgttcgccgagatgaatatgaatggggtggatttgggactgcacggacatacgcataacgggcagttatggccttatcccctactgatgaagcttgtgtatgaatgcccgtacggatattataagaaagggcctacgcaattctatgtatcttccggcattggtatagcaggacctccttatcgggtgggaaccgtctcggaattggtcgtattgcatatccgcttcaaagcccccaaacagactggcaaaagagggaaaagcacgatgcccattcaagggagctgacaatgggcatcgtaagctcgcttgaatgggcattgtaaggccctttgaatgggcatcggcagaaacccgcctattcggtacccttggtggccgcttccaactcaaccggcacgctcaatgtacgcctgtataaatccggatcgcccaatacctccaacgctttctccaatacaagatcatctttcaagctttcttgcaactctcctcgttggtaataataacgttttacgatctcggcggccattactcgtttcacctcatccttgaaacgatcgaaatctttttccagattcggagtcagcttagcctctaattccttgaacgcagtagaatcctcctccagatacccctcgaactcagccacttctttcaagttcctcaatactttctcgctttggcggtcatacgtgaaattcttggacttggcgtattgcttcaaagcttcgaaatcctcatcggaaaccgtaaattcctcgataggagcgattgtcttatgcttttgtgcccaatccgtaacgaagtcgaacaagaccgtatccgccgccaaataatacatcatggtaggcactttcggctccttcacctcaaactccggacgtacgccaccaccatcacgaaccggacgcttcttggacgtatagaatacggaagtcaagctatccggaatagcagccacgctaccatcctctttccggtgcgaataatcgatttgctggatgcaacggccactcgggatatagtatttactcatcgtgattttcacttttccattataaggcaggtcacgaggagcttgcaccaaccccttaccaaacgaacgttgtcccaccaacacggcacgatccatatcctgcaaagatcccgatacgatctcagcggcggaagccgtacctccattgatcaatatagccaacggcattaccgtatccaaaggctccgtagaggttcggtacgtacgatcccattgcttgatctttcctttcgttgaaagcacctcgctgcctttcggtacgaacatacctacgatttgtacggcaccttccagcacgccgccgccgttaccgcgcaaatccagtaccaaagacttgatattatgatttttctttaagtccaagaacgcctctttcacctcttgagcactcttgatagtaaatgcctttagataaatataaccgatactgtcattcttaaccccgtagtaagtaacttgaggtgtcgtgatctgcttacgggtaatctcgaacttccggggtttcttctcgcccggacgttggatcgtcaaaaccatcttcgtattcggaacacctttcaacaactcgctgacccgggagtttgtcgccttggaaacatcgatcgtatcgatcgccaagatcagatcgcccggcttcagacccgctaaatcggccggcattccctcggtaggctcggcaatcatcacgcctccctcgttgttacgctgacggatcaaggaaccgatacctccgtattcgccggtcgtcatcagactcaattcctccgttttttgctcaggatagtattccgtataaggatctaaaccagccaacattgcctcgattccccgctgaacggttttatccacatccactgaatccacgtagaacatctctacttctttcaataaagaattgaaaatgtctaggttcttactcacctcaaagcggttatctttttgcgcccatcccggcactacgctacttgcgacgaacagcaagcaaaataaacctataattcctcttcgttgaaccaatctgtacatacaatatttagttaattaacggcataaatgtaaggaataatacgccgcctaagccaatatcccttttacttttaactttatttgttcccatttatcatacggaatctccgggccaaccacgtcgatcacatagcccgccagcatcgatccgatgcgtgcggattgtaccaaagacgctcctatggattgaccgtataagaatccggcggcgaagttatcaccggcgccagtcgtatcaacaggcttgcccccctcagccgggacagaataaaattgaccatgactaccgatcaaggcaccttcctttcccaaagtgaccaatgagacctctaccaactcagacaaggtatgtacggcctcagcagccttttgcccggtaaaagcctcagcctcactctcattagagaacaaaatatccacatatttaggaatgatatcctccagcattcctttaaaagcattcacgatattgaagttcgacaaatccagcgctactttcaagcccaactttttagccttctccatcgtagaacgaaccaacggctcgtttacgagcaagtaaccttctatataaatacattgatatttacttagcatctcctcggtgatctcatccggggttattgtcggggccgggccaaggaaagtccccatcgtacgttccccatccggagaaatcatcaccgtacagctacctgtaagtccatccgtcttgataaaataggaagtgacacccgctttttccaacgcatcctcataaaatccgccgatcgaatcatccccgatcttaccgataaaaccggaattcgcccctaaagaagacatcgaacgcatcgtgttgcagacagatcctcccggggtttgcgtacgtggcaagccagctaaagttgtacggatagcgatcatttgttccctgttaatcatatccatagctcctttctgtataccgatttccgataggacatcatcattttcaagcctcaataaaacgtcaaccaaagcgtttcctaaacctattgtattcattttttcgtaatttttttcgcaaagatattgcatatttcgaaaataccccgtacttttgcagtgcaatttcagaaaggggttacggaataacctttgaaagagcgaaaaattcttccttagctcagttggttagagcatctgactgttaatcagagggtccttggttcaagtccaagaggaagagcgaaaagacatcgggaaagactgaaaaacattcttctttagctcagttggttagagcatctgactgttaatcagagggtccttggttcaagtccaagaagaagagcgaaaagagttttcatatagagattaaaaagttaaaaactgattcttccttagctcagttggttagagcatctgactgttaatcagagggtccttggttcaagtccaagaggaagagcaaaaagagagatacctattaataggtatctcttttttcttttgttctttttccgttattcacagggttttcaacagggttattaacaatcctgtaatcttcctaccctctccaagcgattaaaaataagttctttaattcttccgcaaggactccacgacgcatattgggaagatgaacgttatcccgcaaatcagcgggcatgtctttaataagtacatccgactcctgcgaagccttataaataaactccgtatcaaataaaaagcgattcacctgagttgaggccaagaacgattttccccgctggttaaaacctttcaaacctccttgagcatccgtatgcgttaatcctagaagcgtaaaattcaatatacgggaagcataactcataatctttcttcgagtacttaaatgggtataataagtatgattccgcacggcgataacgacatcatatcccgattccaaccattctaccatccggcagatagaatccgtctcatacgggaaatcatagtccgtatataaagtaatagatgaggtggaatgagacaagccagccctaacagcggctccttttcccttattcgtatcataacttacgatcatcgtatcagggagagcctccagaagacgtcccaccgcatccttcgtaaatcctctcttcgaagcgtcattcacgacgataaaacggaatgagcggcctttaagcatctttaccaattccgcatgtttctcgatcatcagacgttcccagccttcttgtgggttataacaaggcaagataaggtcgatcgcctcctctttacccgggagagtcttcggccgatgaagcggctctgaaaaatccaatgtcaattgctcccatacgatcttaaaccagatcaacacacaaggaagtgctttcaacgcataaggaataacatacattttccggatataacagggaaatatatctgtaggggaaagggatgtcagaataaaacagaaaacgaatagtaccgtattcaagccaggagtcgtcttacgggtaggcgtacctatataccaaaggcagacggctatcatggctcccaaatatccgctattctctgttccggagctaaaaagaaccatgaacaaaagagtagagcaaagaaaatgcatgcggaaccgccggttatcatattgatttatcctaaaataaggagcaataaataaaagtagcccggggataaccaaccagagatcactatacgtattgactcccgaaatcttacgaaccatccccaacaaagagatatttgtataaggagtaaataaattctctacattcttatcgagaagtacctcataccatttcacgtattgacttgccacatattgaggagacgtatataacatcggaagaacatacaagactatgccccagaaaataagtcctttcaaaaaggcgatccggcgttttgagaatagcaggaaagcaagaccgacaatgccataaatcttagtcatcgtacccaagacaatcattagcgccgcccaaaactcctgtttccgctcaataaaaataaacgagaataaaatcatgccggctatggctatgttaaattgctgcataagaacacacgtaaacaactcattcaagcatacccaaatgacaaacgcctgtttccaatccaccaatccgagtttacggatagccatataaagcagcaagctattcgcgagacaccatagcaacatcccgatataaggagagaagagggagaaaggcgctattatagccgtaaaagggatcccgtataaaaaccggtcgtggtattcattcggataatatatataaaggtctttcaactctaacgcatggaaaaaggaagccctataaatcataaagttattataagtccttcccacaggtaatttcaataagcaagcgacaagggccgtcgcaaaccaaacaaatccgacaaacctcggattcttaaatatcgggcgtctaaaaaaaactctcaacatatccttttttattcgttacaactccactttcaaataaaacttctgacagcctatatgttcaaaagactcgccaacgcataaaaacccctatctaaaacagtagaaaaaacgtaaaaagcatttttttaagtattatcttcgcgacatgggaaagaataaattagctaagtttgacgatatggcgggctatccgcacgtattccaataccctttcgccgccctacaagaaaaagggtttgatatgaaaggacagtggcatgaacgttttttcaagaacgaccatcctattgtcttggaattgggatgcggaaaaggggaatataccgtaggtttgggaaagcttttcccaaataagaattttattggtgtcgatatcaagggagcacgtatgtggaccggagcgaaagaatcgctggaagccgggatgagtaacgtggctttcctacgtacgagtatcgaattgatttcctatttcttcgctccgggcgaagtagccgagatctggatcacatttccagaccctcaaatgaaaaaggtcaataagcgtctgaccggaacccgtttcatgaaaatgtatcgggaaatcctttccggagatggtattatccatttaaaaacggatagtaactttatgtatacctatacgtgcgagatggtaaaagcgaaccattatcccgtcttgttcagtacagacgacctatatcattccaatctggcggatgagatcttatccatcaagacctattacgagcaacaatggctggatcgtggcttaaacatcaaatacatcaagtttgtttgtgaggaaagggaacgattggtggaacctgacgtagaaatagagttagatccttatcgtagctttaatcgcagtaaacgaagcgctttggcttctggtaaataaaagaatgacttaaaaaaatcaacagatatgacaatctatccgaatctgattattgaggcgttgaagaacgttcgttacccgggtaccggaaaggacatcgtttccatgggcctcgtagaagacaacattcgtatcgatggtatgaatgtcaccttctcgttattattcgagaagccaaatgatccgtttatccgctccgtagtaaaagccgcggagacagctatcttaacctatgtaagcccggaggtgaatatcaagggaaacatcacggtaaaagcccgtcagttagctcgcccggaaccggataaattattaccgcaagtaaaaaatattatcgccgtatcttccggtaaaggaggagttggtaaaagtaccgttgccgctaatctagctgtcgcattggctttacaaggatataaggtaggattgctggatgccgatatattcgggccgtcccaacccaagatgttcaacctagaagaggctcgcccttatatggaagaggtagagggcagggaactgatcaagccggccgaaaattatggtgtcaagatgttatccatcggcttcttcgtaaataaaaacgacgcagtcctatggcgtggagcaatggctagcaacgcattgaagcaattgatcggtgacgccaactggggtgagcttgattatttcttaatcgatttacctcccggaacgagtgatatccatttgacaatggtacagacactagcgataaccggagccgtggtggtaagtacgccgcaagaggttgctttagcggacgctcgtaagggtatcagcatgttcaccggagacaaggttaatgtccctgttttagggttaatcgagaatatggcttggtttaccccagcggaattaccggaaaacaaatattatatattcggaaaggaaggttgtaaacgcctagctgaagaactgaacgtgccgttactgggacagattcctatcgtacaaagtatctgcgaaggaggagatcaaggaaagccggtagcgttgaacccggactcaatcacaggtaaggcattccaagaattggccgagaatgtagtcaagcagatagactatcgcaacgagcatctggctccgacagagcgagtgattgtaaccaagaaataaagatgatttatacgtatatacgtgtggcctcgcacgtatatacgtatcgtcctacacgtacgctcgcatgggcctacgcctatatacgtatcagcttatgcgaacgtacgtataaattcagcccacaatatacttggctttcttaccgcaaatctttctgatacccaacacaatcagccaagatacagcgaatgctaccacagaagcggcaggaatctgtaaacccaaagggatattcaaggctctcgccaacagcacgctgggtcccgtaaagaaataatgtaccatatagataccgaaaccgcatatggttaagttcgccaacattcgcttaatcgtatccgacttaacatttaccttcttcgccagcaagaagataggaatcgtcatcatcaccacattgggagaacaataatagaagaataactctaactgttcctccgtgtaagcaggcaaagcggtcgtatagcggaaaccgaagaaagtaatggcatagcctacgacaaacataggaatgcctatcccaacgatctttcctaacgaccaatcatgattccgcagataatgccccaatagcaagtaaccgttaaacccggcgaaataataaagcatactgaattcattccatgagcatccaccccaaatgtaaggagacacgaattcccgataataaggaataaacaaagtcactccccaacctgccagaaaccataatttcgccttatccgaaactttctcgacccaagcggagaagatcggcaaataaagatataagcctatcagtaaatagatataccacatatgtacatccaacaatgagaaattgaacggtatctgggcgatatagcctaaagacacactcaacgattgacgagccacctcttctcccgaataagggaagaaatcaagaataagttccggcctcaaaccaagcagtcccgtaaaccaaggaaataaattataaataacagaccaaatcaagaaaggccagaatacacgcaatatccttttcttatagaaaatagaagtctcttcccggaccggtagcaacaaggctcccgtaatcataacgaacagaggtacacaaggacgaagaaaagccccataggcagctccccaaaacttaatatccccaataatcggagaatctccgggatagaaattaaacgggtctgtacaatgacagcaaacaacagtaaacatggctatcaagcgtacgacatccagccaaactacgtgtgttttcacggtaggatttgttacattttgcataaagtagatcgattgtgtttagattgacggcgaaaatacaaaataatccagccgaataggagattcagctggatttctaacctctattaacgatattcattaatatacaaagtctttcctacgaataaacgccaccgtacgatgtatttccgtgtacatgataatatcctcgtcgataaatggcacctctttccggtaatccttcaagaacttctctaataccggggaagtcctagccggacgacggaactcgattccttgtgccgcattcatcaactcgatcgccaagatatgatccaaattgtccatgatcttaaacaacttcgtcgccgcattcgctcccatactcacatgatcctcttgcccattactggacacgatagaatcgctgctcgccgcatagcaatacatcttattctggcttaccatactggcggccgcatattgagggatcatgaaaccggagttcaggccgggattagcgaccaagaactcaggcaatccccgcaaacccatgatcaattgagcgacacgacgttccgatatatttcctaactcagccaaggcaatcgccaagaaatcataagaaatcgccaagggctgaccgtggaaattaccgccggaaataatcttatcctcctccgggaagatcgtcgggttatccgtcacggaatttacttcggtaagcaggacattcgccacataattgatagcgtctttcgtagccccatgcacttgagggatacaacggaatgaatacgggtcctgaacatgttcctttttccgggcgattaactcacttccctccaatagccgtcgaaaagcggccccggtctcgatttgtccgggatgcggacgcatctgctggatacaatccatgaaaggatcgatacgcccatcgaaagcctccaaggataaagcggcgatcagatccgctttcttggacaggctaaacgcacgcatcaaggcgaatacgccattggcgctcataaattgcgtaccgttcaataaagctaacccctccttgcttttcagcttcacaggcttccaagcgaactcgtccaatacgctgatcgcttcccgtttgcggcccttataataaacgtcacccacgccgatcagaggcaggaacaaattcgccagaggcgccaaatcaccggaagcgcctaaagagccacgatcatacacgatcggaagcacgtcattattgaaaaaatccagaatacgttgtacggtgatcacctgtacgccactatgccccaacgaaagggcatgcgctttcaataacatcatcaaacggacgatcaccggacttacctcatcccctacgctacaggcatgacttttcaccaagttctcttgcaaggtgctcaattcgtccggagagatattcttattacataaggaaccgaaaccggtagtaatcccatacaaaggcccctcctgctgctcgatcttatgatccaagtaatcccggcaacgctggatacgctccttcacctcgggtgaaagctccaacttcatattttgagtaagtatccgttcgattccctcaaaagagagaggctcggaacccacataataaacattactcatatgctataatttagtcttcacccaatccaataacttttgctctacacggatagcgttcgcctccagttcatccgctttcttccgcatcattccgacgaacacctcgtcttggatggacgttaagttaattcggacattcaataaagcccccaatacacaagtacgggcagccatcatcgccacgcaagcatccgtgacggcattctgattacctttgtgagccacatagataatcgtctccattacggaaccgatctcctccgccaccctcatcggaacaatagccgcctctttagtagcgctctgtatcgcattcgtacggaccacctgttcgtcaggcgtttctttcggtaacttaaaagcggagaatacacgatcataagcctcgctgtccttatcgatatattcagtaagacgttcacggatcatagccgcctcggtagcgatcgtcttcatttgtccttccacttccgcatatttctttttgccaacagtcagatgggccaccatctctgtcaaagctgccgctatagcgccattcaaggctgatatacttccaccaccgggaacgggagcactacccgccgtttccgccaaaaaatctttaattgtcaagtctgctaacatagtattttgatttaaatgattcaacaattcttatcttacatcatataaagttccccatccttaattacagtatccacgagattcattcccacatgataaggtaggaacttataagacgggtatttcagcaagatcacgtccgcacgttttcccacgctgatacttccaatctcggaggcacgtcccacagctgcggctccattaatggtcaatgccgttaccgcttcttcaggggtcatcttcatatagatacaggccaaggctatcatcatcgggattgaggcagagaaacaacttcccggatttagatcggaggctaaagccaccgcgcaaccggcatctatcatcttccttgcaggcgcatacggctcattcaaggaaaaggcagtcagcggaagtaaggtagccacgacacccgctcttgccagacgtttgatgcctgtgtccgatatatgtaacaaatgatcagcacttacacacttcaaggaggccgccagttccgcccctccgaaaggaacgatctcatccgcatgcatcttcaatttaaaacgatgatgacgggcggcacgaagcaagcgctcactctgttctaacgagaaaacgcctttctcacaaaacacatcacaaaatgtaaccgtatgttcggctcgtatggcaggaagaacttcctcgatcatataatccacataatcgtccgtacgaccggcaaattcaggaggaacagcatgagctcccaaaaaggtcgatacgacatccatcggatgagactcattcaggtccgacatgacacgaagctgaactaattctgtttgcaaatccaaaccataaccacttttcccctccaccgtggtaacacccatggagaataactcatccaaacgttcttcccctctgtcccatagtgtatcgaaatcactttcacgggtagctttcatcgtattcacgatacctccaccacgctccatgatcgacatataactatctccccgcaatcgccaagagaactcctcctcccggtaaccgccaaagataaaatgcgtatggctatctacaaatccgggtaacaccgcttggttctccgcccgaatctccaaataatcctccgcatggatgtttcgaagtacctcctccgtaggtcctacatgcgtaataaccccatcagacatcgctacggctccatcctcgataacgcctaaatcagacatctccgctccccgtcgcgccttatccccatggcaagtgacgatctgggcagcattcctgattaatatcttgctattctccatacgctattccataatacgggcttccagcacctgattcattgagaaatcctccaatcccaaatagtaagaggccgtatcgatcaacgcctccataggaaccaagccgataatctcgctccccaccaccgaaacaccatatctgcgagcttcgatacgaactaactcgaaggcccggtacaaggccgtacgggtataatcggtcatattaatagagacctgtacgataccacgttccttcaactcaacccccatcgctttacaatagcgtaaacctccgccgatgaaacggattttcttcgctatatccgtagcgatatgcaattgattcgttcctaagttcacattataggcgaccaaaggcatgcgggctcctatggcgaccgtaccggctgtcggatgtctttcggccggaccaaaatcaggtttccactccggttgatggattttctcagccatcccctcaaactctcctttacggatcgccgccagattctcccggtaaggggcggaagctgatttctcatataagaagacaggtacggcataacgagtgcccacttcctcccctacttccttagacaaggcgatcgcctcttccatcgtacatccgcgaattggtataaaaggaacaacatctacggcccccattcgaggatgttgaccgctatgcttgtttaaatcaatcagctcaacggcaactccaatggcctccaatacggcttgttttaaagcgactggctcccctaccacggtaacaaccaagcgattgtgatcctcgtcattactatagtccaacagtttaacacccgtcttagcccggaaaggcgctacgatcttatctatcttctccagatcccgtccttcactgaagttagggacacattccataatcttattccaagtactcatacctttttatttaatgatgtttgtacgatttcatgaataaacgccctctccgggatatacggaagggtaatatgatactgttcgccacggttctcattgaaagtagcgctcgtacgcatcgcattcgggttacgggcccatgagcgacgagcgacaccccccatcacgtcccatatcatagcagagcgaagtatctcgtccacccgctcactaccatcgagaaccataccgaaacctccgtttatcgccttaccgataccaactcctccaccattatgaagagcgaccaagctcataccccgggcggcatttccagcgaagcactgcaccgccatatcagccatcacattgctcccgtcccgtatattagaggtctcacggaatggagaatccgtaccgctcacgtcatgatggtctcgtcccaacataatcgggcctacctccccatcacgtaccattcggttaaactcaagggcgatcttcaagcgcccctcagcgtcttgatataagatccgggcttgcgtacccaccaccaaacggttcttctccgcgtcacgtatccaattataattatccatatcctgccctcttcgagtcggatcgatacacgccatagccgcatgatccgtgcgaatcaaatcttccggcttaccgcttaaacatacccagcggaaaggaccgtacccataatcaaataattccggccccatgatatcttccacataagaaggccatataaaaccatctttctcatccacaccgttacgggaaatctcatgtacaccggcatcatagatcgctttcatgaaggagttcccatagtcaaagaaataggtaccccgggcaaccagacgcttgatcacctcgaaatgtctcttcaacgttttatcgaccaaagcacaaaagtcttcccggtgatgagccaataattccgtacgttcctcaaacgtcacgcctaccggacaatagccaccttcatagaccgcatgacacgaggtctgatcactcaaaaggtcgatggaaagcccctgtttatcggcatattccaataaatccacaatattaccatgaaaagcgatagagatcggttctttcttacgaatcgcctcgttggctaaggagaaagctttccccatatcatccgtcacatgctggacccatccttggcatcggcgtgtctcgatacgggaagcgtctacctcggcgattatactggcagcaccggcaatcacggcggctttaggttgagcgccactcattcctcctaaaccggaagatacaaacagatagcctcgcaaatccttatcttgtggaatccctaatttcttacgtccggcattcaacaaggtattaaacgtaccgtgtacgataccttgcgggccgatatacatccaacctccggccgtcatctgtccataattagcgactcccatctgggcggcgacatgccaatccttttggttatcgaacattcccaccatcatggagttcgtgataatcacccgtggggcatccggcttagaatgaaacaatcccagaggatgcccagattcaatcaccaaggtctgctcctcggtcagctcctccaaatacttcttaatcaaacgatattgcatccaattctggcagacctgcccagtctcgccatacgtaaccaactcgtaagggtacaaagcgatatcaaagcagaggttattatcgatcattacttgaaaggcctttccctcgatacatttacctttatattcagagataggcttcgctttcaggtctccctgcggacggtagcgataaccatagatccgtccccgggtcaataattcctccatgaactcaggagctagcttctcatgtaattcaacagggatgtaacgaagcgcgttcatcaatgccgtttctgtttgagcgggcgtaagcgaatagccgcgatcgggagcacggcgaataccggaaacgaaggaaggatattccggcaaatagttatcaagatgtatttccataacgtgaatgatttagtaggtgcttacaatctgcaaggaatttcacggattcagcgccgacaagttagcgattatccaaatcccaaccaattatcattccatgtttagaagcataaaaaagcccccgtctctctcatcctccctaaggaaagaaagaaagaaagacggggcataattataattgttcagtagtagaagtttttcctgatccattaggaccagcaacaatacaaagtgtagggcgtttctctttcattacaaatcactatttagattcgttcgatctatatatcttcagtttttctctcacttcctgcattcttcgtttcagttccatctccgctctaagtgaactttctcgagcggcaatagctacttgctccattatatctttcctatcatgaagtaactttaattaaatgaatagattatcaattaaatcttcgctctatcaatccaattctctattttaagatgaggaatacgttctaggtgctttacattttctgtaactaaaatcaaatcatttgctacggcagaagctccaatcaacaaatcaaaatcatctattaaaagtccttgagatctcaatgtgctttttagttcagcgaacataagcaaagaaccgtaaattggtaaaactgtaaactgcgagataaaagattctacctctttcaacattttatcctttcgatttgagcaagtagctccatatagaagttcggcaatagtaatttcagaaataaagcaatatcgcttcattttatcatcaatcttctcatttaaatgaaatttccctttcatatagaagatacatatgttggtatctaaaagataacgcctcattcgtcaaaagattcaatagatcgcgttcccaaaacacgtgctttattaatttcagcaataatctcttctgcacttttgtcatcatcccaagcgccaaacgaatcttgtatggatgtctctttctttttacccctcaaaaggctctctgaaagcttacgaatgacacgcaactttatctcatcgctaaacgaagacaataaatttatataactatccgctattttcaccgttgtatccataatctttttcttttacagaaacaaatataatcattattgattataatacagtatttagtctactttttttgcaagcgtgaaccaccaatacagcgtacccagtatttatcaacaggttaaccataccagtttttctgaacaaaattcagatttcttattctttaacaattaagcggctgtttgagacggctttgttatctcagcatccttgccgtctccataacgacgaacatagtcacatggcaagaacaaagcgtccacattgttcaacttgcaactttctaccaaacacaaaaaaaggtgcatcaaaatgacacaccctcctcgtaacaaaaataaaatctttatgattagcctctacttaggcctacacagtaaaacgaatttaactcatggaatagctgttaaaatcaacgctcaatcaagccccttatacctccaacgatatactcaatatcccgatccgttacatacgggccggaaggcaggcacaacccaaccttaaacaaagattcgctcaccccattcacataagccgggcaatccttatagacaggttgcttatgcatcggcttccacaaagggcgagattctatacccatcgcgtcaagtcccacacgcatcgcctcgacattggcattcggctcgcaatccgtatgtgcgttaaccgctacgtgagtcacgccacccgcaccaccaacagcaccttgtaccgttgcttgataagcattctcctgccctttcaccctcaataaaggatccaagacaatcgtattcaaccaataattactatcaaaacgaccggaaggattctcatgcaaggtgatccctttcacatccttcaacagttcccggtataaatcacacgtatgcttatgatgagccacatgagcatcagccaccatcatctgaccacgcccgatacccgcacaaatattcgacatccggtaattatacccgatccgctcatgctggtaatacggataagcctcccgagcctgcgtagcgtagaacatgatctcctgcttagcctccccgtccggacaaatcaacgcacccccgccactggtcgtaatcatcttattcccattgaacgacagcaccccatattttccaaacgtacccaacatacgtccatcataacgagagccaaaaccctccgccgcatcctctatgaccggaatcccataccgatcagcgacagccataatctcatccaccttataaggcatcccatataaggcaacgggaacaatcgctttcggtgtttttcccgtcttctcgatacgatcttgaatcgcctcttccaataacacagggtccatattccaagtatccgcctccgaatccacgaacacaggtgtagcccccagataagtgatcggatgcgaggaagcacagaaggtaaagctctgtaccaacacctcatcccccggcttcacgccacaggcaagcaacgccagatgcactgcggcagtaccggcagacagagccaccacatgtttaccttcacccacgaattcctccagatctttctcaaatccattcacgttcggacctaaaggcacaacccagttcgtatcaaaggcctctttgatatacatttgttctttgccgctcatgtgagcaaggcaaagataaattcgtttattcattattattgtgattttagaaaatacttcggatcagcataaaagcctcagctctttctacgctaattgtagcacctctatatttcgccaaagcttccaaagcctctaaagaacgagaactagggaaccgccttagttgagattgataacactccatcgctctcaatttcatttttattccatcttgactacaaggaatgaataccgtgggaataaaagcatcatccgcataaggagcagcccattccgtttcagataacgtttcataggtataaactcgcttaaccgtataatctccaacaggacgacaagcgactaatacactgtcaaagaccatccgatgatctttatgaatatctcctctatggggaataaacacagtatctatttgattttcggatatacattttgaaacttcacgagacatgatataacctggatattgatctaatgcaggagccggaaaatcaaagaaaaaggtctgttttacacctagtaaacgatgagcctccagtgcctctgttctaacacgctgaatacctttttcggaaaaaatatttggatcagatttactggcatttgtcataatcagcacatacacattatgaccttcttgtatcattttataaatagttgccccacaacccaatatttcatcatccgcatgaggtgctacaaccaatatattcttaaacacgactactcagttaaatatttattaataatattataaacatattcaatctcattcttcccataacgctgatcaatcggtatagggatcatataagaggatagataatactcaaaagatgtagaatcagtttccttaagcaaataattccaccaacgtccggtataaattttctctttacttaaaagatccaccatatcagatttctctacaactaatggataaacaaatggaacacaattatcatcgaaatatatatgaggattgattttattcatagaagaatataaatcagatgccaaattataattttcaaatcttttatttttaatataaccataaggagcatttttaagtatagcccgagaaagaatagacattctagaaatgttagacatatctagacgcttctcatttaattgtctatattgataagcagaattgcaacccacttctattctttgtaataagaaacctgctgtctcagaagataaatcttgatcatattcatcactaaaccttacagcatctgggcctaccacataacagccatcaggaacgcctacaaactttctgggagaatagacattatagactccatttataggttttgcgaatagagattgggcattgtcgatgataacatttttatacccctcaatcaatgataacatgtgctctgtagacataaggccaaaataattcacaaacactattgcggtatcatcaccttgagaaatatcaagaggcataaaatccttatctatatgataataatcaactttaagacctttgccaagaagaaaatcacgaaccgtaaagcactcataataaggcaaaaggactttatttacatttagaagtctacaacaatgataaataccagctctattaagatttaacctacaaacttcagagccatcaaacaactcaccagtatcacgtaagtctaattccaaaaaactacctatttccatttatagcatcaaccttatcaactacatactcaaaattaaatccacaattaaaaatataatcaagaacagacatattctctataaaatcaccccataactgaggatactcaataggagaataatccatatattctaattttaatcctctttcattaaaatgggattcatcttgatatactctagcaccattacccgaaatatatgtagtagctccaacttccaatgacaaatcaattacacgctcctctcttttagcatgagaaagcaattctgaggatctaaatattttaggtttaataccaaattgattggaaataaatgtatttaatgctatattcaaatctgccacattggagtagtcatttagatatacctcttttaaagatggataaatatcagaaaagaaaggagctttcttataattcatctctattgtcttaagatgcctttccttccatttcaattcatctttcggtctcacatgattaataggatcaccaaatttcatttctacgggaaactttacacgcaagacaccttgaggtgtcttgatcttattaaaattgtgagccgcttcattcgagaactgagcatcatccaagtatataaacaaatcagatttatacatcttgtaaaagaatcccaaatatggaatataatcaggctgatgtattgctactttcataagcattatttttttctgttctttcttcagataaagactttcttacatattcgccataattatcatttttcctatggattaaaagtctaaacgttctaaacaatatttttaaatcaataaagaaggagcaatcttcaccatactccgcttcccactgtagttgttcatcccaagttggagtaggattatcctttaaaacttcaggaggtaacaaacctcctctcactttaaatctttttttctcataatcagaaaaatatatattgtatttagaaggcattggtcttggccctatgatagccatgtctccgttcaaaatgtttaataactctggtaactcatctaaactggtatttcgtaaccaactgccaaatgaagtttttctcagttcatccggcaatagattcccatctgaatcagttttattagtcattgtcctaaatttcaataaactaaaagaacgtccattcaaagttgaacgctcttgtataaagaaaattggagatcctaatttaaaccgaatcactactattagaactaaatatatgggaatcaaagatacaatgccaaacaatgataaaacaaaatctattatcctttttatatatctatacatcatactactatatataaaaacatactcagattattttttttcactttccttatttttcaccaaagttccaaaattaacaatctggcttttctcacttatctctattcctgtcctaataattcgagctggatttcccgcaataagacaatgactaggaaaacttttcgtaactacactaccagctcccacaaacacatgatcccctaatgttacgcctggagtaattattgctcttccaccaatgacacatctctttcctatatatgtatcaactttatttttacccctaaaataatcatgagccaataacataaccccaaccgacacccttgtctcatctccaatatgaatacccctaggatttactttgtccatatctatcctctgagaaatagagacgccttttcctatatcaacttttttgacatatttcaaataattggtatatataccacgaactaccttactaactctttgccgaaatgttttcttttccatataacttcaatattaaatcttagaatattaattattatcacttatcaacttaatcttaaaatgcttactagcgttggcacaaccatcggtttcgtcttcacccacatcgtcccccaactcaatcccagtccaaatgaagatagtaacagtgtcgtttctttagtcctaagttgatttgcgatccttattaccatcaatgacggaatcgaagcacctcctaagtttccaaactctcccaaattataaggttctcttcaggcaactccagtttttcacaatacgatccacgatcatcttgttcgcttgatgaatcaagaaataatctatatctgtttcacgattgatattataatccactaagaacatttcgataacttgagaggatgggatatagcaaatgagaagacatttatatgtttataaataaaaattcagaacaagattataataaagtatatccaccatctatcgctaaactagaaccagttgtaaaagtactcgcattagaaagtagataaatcgcatagtaagcgatttcttctggcttcgcatagcgcttcaaaggataagacaattgatttttacttacctgttcttcagaaatattatctctatgaataaagggagtttctacccttgcaggaagtatacaattcacacgaattcgttgagcagctaattctaccgcttgaactttcgctattccctgtatcgcagactttgacgctgcataaatagagttcccgatatgtcctgtaatcggtccatcgatagaagatagatacacaatagaagctcctttatttattcgtttatatttcaacagtttctgagttaataatacgggagcctcaaaattcaaactcatcatcttcctcaaaatctcatacgttgtaaacttaaacggcaatgtcaatcccatacctgcggaatgcactaagccatcaatcacaccgacatgactacacaagtcctctatggactgagaatccgctatatcacagctaaaataggaatgatctccatcctctaactctgcaaaagcccgaattaagcgttcttcatttcttgcgactaatatcaagtccgctcccatccgactgcattctaaggctatactttttccaataccggaagaagctccggttaccaaaattctttttcctttaagagaaaaaggattatagttttccctcatactctatcaaagataaataacgtaaatctgttgaaaaataaatgctaccccatgataatcctactccaaaagctgtcgcaattactttttgttttttcttaagcatatcattacacgaagtggttaatgtcaatggaattgtagcacaacttgtatttccataatctcgtaacgaataaggaaccctttcctccggaattttcaatttcttacgaatcttctcattcataaataaattggcctgatgaaatataaaatagtctatctcattcacctctaaagaagcaaagctaagaatatccagaaccgactccggtgctctttttaacccaaatgcaaaaacagacattccatccatttcactatctaatggtcgccgagcaatgccttccccataaaccacttctttcaatgaattttcagttacaggattccgagctccaccatctttaacaataattgaacggtaagatttcccttctgtagcaaacgtaaaaaacatatcatccgattcttccgaatactctaaggccgttgctgttcctgcatctccaaataaaggccaagcggtcttatcattccttgatttgaatttcgtaggcgtatcaccaaccagcaacaaagccttcttcatataccctgatgataaaagagaagcaacaacactcattccataaacccaacccggacaaccataagatatatctaatgtataacattccgtttttaggcctaaacgtccttgcataatacaagcatttgaaggtaatatataatccggagtttgggtcacgaatatcaagcaatcaatctcatcccgtctccagttcagccccatgagcaaatcttcagctgcgtcataacataaatccgcagaagtcgtatccacatccgcaatacgtctacgctcaatgcctgtagaagctatcactttttcagcctcaccctttttaaaaaaagacaattccttattttcctcaatcattttaggaacacatgacgtaattcccgcaatctttacatttgagatttttaaatgactcattttccctattagataattgataaatcagaatagataatcttacccgaatcagtccttggtatcttgccaataaatcgaacctcataagctgaaggatttattaatactcggtttaacaaaaccgattttatagaatcaattttatccaaatctgtaacataaacaattagtttatcatcgctaccaacacaagcacattcttggcaatgatctttcacgatagattcgacaaaatctaaacttattcggtttccatataatttcaagaaacgtttctttctccctgatatataataaaatccctccgagtcaacataagctaaatcgccagtataaagtatccctttattctcatcacctttaaacagatcatctaatgattcggcatatccccaaaaaacattagagccttcatacactaattcgccttccacattaggagacactatccgcataccatcctcgtcaatcaaagaaaaatgcccacccggtattgcgacccctacactccctactttattcaaagtatactcagcaggtaagtagctcattcttgcggtggcctctgtctgcccatacattacataaaaacgtatatcgtgcaaacgtgcatattccgaaaaatacttaattaaagaagaattcaatttaccaccagcttgcgtcataaccttaacagatgaaggcaaaaatttctcaaaacgcattttcttaagaatttcatacgtgaagggaacacctgcaaaagatgtcgccttctcttctaaagcgaatttccaaaactctcgctgcacatacgatttatcagtcagcaacaaggtagcacctgccaataaatggctattcagtactgataaaccataagaataatacatcggtaaagatgtgatcgctttctcggaagaagttattttcaaatattcaatgatagaacatgcgttactttttaaattgtcatgtgataagcgaacaagtttaggagatcctgtactacccgatgtagtcaatagcaaagctaacccctcaggtaaaaccaaagaatctccttcatattgaatcaaagaatatcctcccaacgaatatttttccttccccttaacaagcagatctcttctactagggaaccaacaatatcgagggtgataaatagcctctaaatgatacaaggtctcatccggaacatcccgactcaacagcaaaggaaccacccccgatcgcaaacatgagacataagccacaattgattccaatgagttctcgcagccaataaaaatcaatgagcgtggcactaaatactcagaaaatcgttcagacaatcccagcaaatcagcatacgtatacacatgatgatcctctgtaataaaagccttattcgatagaaaagaggagaaatcaaacattagaatcgttgattatatttactttctaagaccttaatggccgagtcaaacgtatcgatctcaaacatatcatccgcttccaaatttaagtcaaaagcatcctctatttctgaaataagcgtaatatgtccaacagaatcccaattcggagattcttttaacttaagagcaggaagttggtctatagaagacagatttaaacctttgaagaaagcggtttgtaatttttcaaaattagtcgccatctgtcacttttttatacattcaaacaattcttgtatagtatctgactttagcaagtcatccccttttaaagaaatatcatattcctcatcaatcatagcaattactgataaagcaactaacgatgaccagtcttccaactccttaaaatgagtatcaggcttaaatacagatgactctgtatcatcaaattgttcagaaaacttgttgataaaatcttgtaattccatatattattatatttaaataaaatcaaacttttttgcgggattacccacgtaaacactattatcctttgtttttcgcattataacactattcgcaccaatagtcgtacctgttcctatcttgacaccttgtaaaactacagaagatacaccaaaaaaattcaatgttccaatttgagtatctccactaattctagcagctgtcataaaagaattgaaatctccaactttaacatcatgtcctaaagaaaccctgttattgaaaacattaaagtttcctaatctaacattacaactcattgaagcgaaactacagataatattaccctttcccatcgaaaaattatcccaatctaaaacataagcttcgggcgcaacaatgttaggaaaatcaattaaaggattatttatattcaaataagccctatacgatattttaggatttccaaaagcaagaatcaaggataaatttgacggataagtattcaaatcatcaataccacccaataaagatccatattcatttgaacttccttttggtttattcctaaaatcgtcatcaaaaaaaccaacaaaattccattgattttctatacgatttattcgttttatcaatgaggctacttcacgaccaaaaccaccagccccataaatagcaatattcttcattatttacacattactttttgaaatacgttggttagttgagaagctattacatttggagaaaatcgggcacgactatcagatgcgattttctctcgatcatatctattatgacattcatatatctctttaattacctctactaaggaatcaatatcatcaacaggaaaaagcataccattagaaacatttatacattctctaattcctccacatatagaagcaactacaggcaaaccttcgcacaaagcctctaaaactgccactgaaaaattctcagatcgcgatggcaaaacaaaaacatcactattacatagtacagaactaatctctgtctttcctttccttcctaataaatgaatattattcttcaatctagcctgatcaatctgccgctccaaatttacacgctcctctccctcacctataatagttaattcccatttgtctaaaggtaatttaatccggtcaaaagcagcaattaacaagtcatatcctttaccataaagtaagctccccgttgaaacaaaacgaatcttaccatccaaacgagctttagaatagcttccacaaaattccgtcccaaccatattatgaactacagtactgtttgtctgaaaatgttgaagtaaacgttgcttcaaagattctgagacagaaataatcgcatcacatttagaatacgttgattgccccaaccagacaacataattagacaaaacatccttattaagctggctccaatgctcaattgctaccaaaggaagattatatttcttcttcaagtcaagtgcagcataagagtttgtcaaataatgagaataaaggatatccggtcgaccatacttttgaattactcgattaaacactccctttagctgcatccttttgagaaaaaactctactctttttccaaataatctacaggcgatcgcccctagaataaaaaaagaatcataataatcaataccattcaagcgataatgagaaataccagatttccgccaatagagtcgaaaacgactatccacactaatcacgacaaccttatgcccgactgccacaagagcttccgcttggtctttttcgaaacacccccattgaggatcacgtttagaaggaacaccacgagatattaatacaataaacatgaacttatttatatcctataaaacattttttagacattcaatttaagacatttttttgcacagaggtagtttctctataccctattcgaattattataataaaatcaactttattaacatcctataatcgtaaaccttatatttataactatacgtttttcctacgcaataataatgcataaaactccatcacaagatataaaaatatagaactagttaaacctgatacaattgaacctcttggagcaaaaaatattgttgaaaaataactaaaagacaaaacgactagaaacaaattaaatcttttgtgcctatcctgaaagattgtatctaatttacgaaacaaaaggccaaataagaaaaacaacaataacgtagcaaggaaaccaacatcacacaacaattcaccaacacatgaagatcccaagccaaaatccgcattatcatattccgttacaatttttgccaagtaataaaaattcaaatcaacaccaattatctgagatatcaaaggtgttaaaaatggaatagacccaagtaaagaaagtaataaaaataatccaccataaatatgccctatagtccaccaataataatagacattataagtatatatactaaaagctaattcacgtgtcggagaaaacaaagttacattttcactataagactgatacaaagtatacccatgcgaaatggcttcaaatacatccactccttcataatgactgagagacagtcctcctaaaattttaaagagactaaaaaagactcctcctataataatcaatacaaaagcatataacaatgaaagatcttttttagataatagtatatagccacaatacaagaacaagaacaaagttacagaaacagctcttccaccggcagtaaaccataacagtataattgacaaatataacaacataaaaggggaaggaaataactttaaatagtttagcacaccattcacattctccttgctgttatatacattccatacaaccatcaccactacagcttttagaaaaagctgcatataattaaaaaaacgtgcagctcccccatctccaataatggaaccatctccttcagccccatatccaccgataaaaaatgaaaagcccattctttgcacaaaaagtaaaaagcaaagccacgccaaaataacaaatggccatacgtaggggaaacgtatatgactacttgattctgatacctttttaggaacttgtaacactgaataacctaacaaaaacaaagaaagacacaaagccgaaaaattcaacgccccgcaaaatatgctatccttataaaaccaattcatcctcacatcataccccaaaacatagtccagtggcaactgaaaatatacaatcacaaaaaacagcacaaacatattgcgaatagaaacaacacgtctatcataacgagtgatatagcatgtataataatgtataattaacattgcaaatacgcctattaaaacacttattatataccctttatctaatgtgttaggtgcaagccaatgaagcaataaaaaataaaggggaaaacaaacttgtatatataaagaaaaacaacggatcatactaactatcaatttgagaaattatctaaaacacttttatataattctttttatccattttccactttcagtttgcatatagtagcaaacaaaaaacgcaaacaagattgtgattaaccataccactccccaaacttcgtagacattccacataatccagcctttcttcaaacataaccccataaaagcaatcacatacatgtgaaaaaagtacattaaaatactcatggaacgtaatgtttgacagaaagttatattattctctaaaaatgccactgcaatattacttcccaaaatgaaaagtcccatacttaacaataataaagaaaagggataatcgtgaataaacatcactcctccaagaacaacgaagaagaaagcaaatagtttatttcttaatttccatgttgatataaccattcctgccgcaatataagctagcccttgacaaaatccattacgtgtatttacaaagactaaatcatatgccttatatacaaaggcggaaaaaccattcaacatacttggattcgtatgttcatatttccaacctaaaaacataagtagcaaaccaatcagaaaccaccctctcgttttcaaacgaattttaacaaataaatatattaaacaagcagcaattagagaagcaagcaaataccacaacggccaagaataattatgttcacctaaaaataaaaaaccacgtacaaacaacaaacaatccgcacgccaagataaatgattctgataatacccgcaaatagtcaaaggcaaatataagatagtccaacacacatacaaaaataaaattttcttcatccacctatataacccttgcaaaactgattgcttggtagcatttgacaatacaacatgttccgcaaacaaaaaaccagaagttacaaagaaaaacggtactgctgtttgcatcaagcaagataaaaacattgggtatgattcacccgttatggatttactatggattcctataatcaatgaagccattatgaacttcaaaacatcaatcaagacatattgctttctttgaatagttttttcctccataccatccagctattcatgtttacacaatttctcaaaaagggcttcccactgttttgcgatattttccgcttcaaagcgctttatagattttaaagcattgcatcctaattgaatacgaatctcttcattgactaacaccctctccaatgaaagtgataacatttcaatatctccatcgggaacaactagtccgtcttttccatgagaaataatctcattaacgactccttgaatggcaaatgctacacaagtacacccttgcgacatagcttctaacaatgacatcgggaatccttcaattcttgaagacagtacaaatactgctgattcttgtaataaatcctgcacattatttacaaatcccaagaaacgtacagaatcaagaatccctctatcctcaatttgctttttcaatatatccatagattcgtcagaaccggttcctgcaatctgcaatatccaatccggatgttttgacgcaatcatagcccatgcctcaatcaacagatcaaatcctttaacacgccaaacatcaagtcgccccatggctgttacaacttttttacgctcaccgatctgatgcaagacatcaaatgttaaaggattatacattacaattttcttaggatatttattacctagtaactgaaaatccttttttgtcaaaatagttaaaacatcggcaaaaccatagagatgatgccttataaaattaaaacgcatcaatttattaggcaaaaatgaagtatgatcagaagcaatcaaaggaatgtctattccccaagtaacaagtcgtgctaaaagataaaagagaggcataacaccaattacaacatttggtttttcagccttaacaattcttcttgcattccgaataactgacaattgacgtacacctttgggcaagtgcttgtatttttcactataaagtgataatagtcttacacgctcatttataggataactccctttactcggatttgtagcaacagccacatcatgcccacgcttaacaaattcattacacaaaagcacagtaactcgttcagcacctcctcctattaaagccggaatataaaacaatattttcatttcaccttttcaactaagaatcgatacaatttcattttctcatcggtactaaatccgaccaacaagatactaattgccattattaatacttgaagtaatatttgaagtataaaattcaaatcgtctaatattactctaagtaaataggtttcacaagcaatcaataaaaagacagaaaaaacaactcttaaaaccttagaataagaagaagaagatacaaattctatttttttcgacaataaaaagacacaaaaataattaatcagttctactacaaacataatcacaaaaactgaaacaactgaaaaacctaatttcaagacaatataagatataaataaaactgatatcaaaagtatagactcacataattgatacaacttcaattctccagaggctttaaaaatcaagtttagtggaaaatgcaaagccctaaaaaacaaatacaataaaatccatcttaaaaaaacatctgcatacataggtacttgccccaaccaaagccctatcacatcattagtataaaagaaaagtggaacagccattaacaaataaataaaaacaactattcgggtatataaattcaacaaataaaaaaattctattttcttcccctctgaatataacattattccctgaggatcaactgcgacaactacatttcgcaaaatggttgtcaacgcattcttcacttgataaactataccacgtgcagcattaacattagttccaccaaatgcatttaaaaggatatttatcccttcatgagaaattgaataagacatatttccaaaaaaattccaagctgcaaatgtggacatttttttcaccaaagaaaaatctttcaatctaacaatcttacattctggaaatttctttttacaatatatcatattaaccaacctcattatcagagaaacaacaaacactagcacagcatacaatttcaatttgtcacaatcaaaccaaaccaaacaaaacactataatcaaacgcaatacaccatccaacacagatgagtaagcataaaaattcatcttctcatttgcgataattagtgcatcataaggaactgtcataatcattataattgatgacaaaactgataaatgtaacacccaataagcagtagaaattcgatctggatcagcaacaagtttatgagatataaaccatccacccacacactctactaaaaaaaagaaaaatattgctatggctgcatgaatataaaaaccaattgtaaatatctcttgaatgcggcttaactcatctcgtactttttcataattaatgaaacgctgtattgctgtagaaaacaatgtcttcaatgaagaaaaaagaagtacaaaaccgcctatcacattatataatccataatcatctataccaagttctttcagcaacactcttgaagtataaaacattacaatcaagagtattaacatacgaacatacaaaaataaaacattttttgataagcgtttaatatccatggattaaaatgatattattcaaacaagcgtttgatttttcgcaataatctagaccaaaaataataattgtaatttttagcatctgtagctacaatatattttcctttataaaatgccacattgaactgatgccccccataaaaataaaatttatctttacgatcaaatagattgtctataaaaatctcttccacatataaatcttttgccaaagattttatcttatgtacagaaacattttctccataagttttagagcaatcctgagaaattcggaacagacaatcatcatacactactaccgaacctgcatttcggccatagtgattatctgaaagtaatggagatatactcgaatatacatattccccaatcaagttatcagcataatacaatagcaatgtatttttaccattatgcatcaccgtagtaaacaaataatagacaccttctatgggaactatgattgaatcaacaaaactcactcctcgaacaaaaaaaggaggcttttccacaagtaccttgcaaagagaaaaagatgttaatccatcattatcagccctgtataatcgaatagaatcagcttcattcgtttccggcaacatatatatttgcccttgatgttcaaaaacattaggaaacgataaatgaaaagactcctgcaacaccaaggtttcatcactccaatgcaacaaatcatctgtataacgcatcattatcacacctggcgaaaaaagtcgtttactctcatagaataagaacaaacgaccatgccatgaaaacaaaaaaggatcggcctccatgacaataggattagtttgaaatattccttttatctttgattcccaacattttttcgcacctttcaattcaaaaatcgaatttccctcaggaatctctaataaccgtatattaaattcctcaatcatttttcaacaaacaaaatcatgttatctatcctactccttctctttttttcaagcacttggctattttagcaggattccctacaactattgtataaggaggaacgtcctttgtaacaacagatccaacaccaacaattgcaccttcaccaattgttacacctggaagaattattgctcccataccaacacaacaacccgctttcaatactatactttttttttgataaggtaatttattataatcatcaccaatacaataatctgaaataatacgtttatggcacaacaataaactacgacttgcaatccatacaccattttcaatagtaatcaaattagcattgccaacatcaaaataaacatcatacccaatcttaaccttccctataatattaactccagctaatttccataacttaggacgaatacttggatgaaccgcattccaaataccattttttgccatcttaagcaacacccatttaaaccaatacgaacaacgatttcgtatataacaaaatttcagaaaatccatcatcaacaaattacaacaaacattaaaatcaaggtactaaatcgtacctaaaactgagttcaatttaaatataaattttacattttagacacttccaccttcgacttgagtagagctgcaatttttttaatccgacttaatgaattaccattatattgaaaaatcaaccattttacactcagattggataatcatatctgagaataagtcaagcatttatctcagattttctttgtcagaaacagctccgtatattttatcgcagaattttctcatggcatttgaattcatacgaggaagttcacctattttcgatattttgcgtatatatatttgtatcatgaaaaggaaatgataacgatatttcctaaaaatacctttaatttcacctcggcatatagcattttctatttgatgaagtgtctatgcactaacatagtaatcataaagcacatgttgggattgaaagactttggttctataagctttgaatatctctccataatatctgtaaacactatgaggttcctccataaacatactaataaaaacatataattggatggccatagaaaccacattagatttctttacattaatagagttgccatcatactcatgcgatcgtcgttcatagtatattctatcattgtctttaaaagagttataaaagtactgaagctgcttgtggaatgttttaagagattcaaatgcttcatcaagaacttgcgtttgacgattggttgaccttattacatcatttattaattcaagatcttccgtacatactattttaatcgaaagcatcatatcttttttaagaatgtttctgttccgatatatttcatttgatgtttggcaaccgtttactatttggaaatccagaagtatgtatttgccacctaacggtcttaaacttttggcgacaatagtaacaccgttgttcagaataaggaattgtatatacttttccttatcacatatcgtatctgatatttccttgttgacaggattttctccgagatagcttcttacattttcataaaaaagtccattctgaagatagtcgtcttcgtctgttatgagctttattgactcatctacagagataaggccaagataagcattgtcaacacctttgatattgggaggaaaaggaacagtctttgatgtgattatttctcttgatatagcattgcttatttccttataaatggaagacaacttaaccaaatttattggaataaactttatataattgaagtaattaagatcggatataaatttctcacatttatgttttatgtccatcagattagagtcttccacccactttccacaagttacataataaacaaaataggaaggccgttcctttaaattaatactttgattaaatatataatcggccatatccttaaatcttttgacttttcggttccctgaataaactttagaatctttatcaaagaagtctttttactccaaattctgttttcagcatatcctcactgttgaatttagagcttgtcttggcctagacaaaaaagaatgatgcttcaaatctcttattatcaattacatctttcaaatgttgcatgtatgtaacaacaatatcgttgacggttattaatatacccatctatcgcattatcacctccatttcctgtatgaacaaccttatataaaaatttgtcatttttatatgcatcaagatattatgaatgaataacgtgtagttacagaaatgttcaaaggtcgtactttcgtttttttccttgatgcaaaaatcatcaaggtcatttttcattagactataatattctatcttccatattcgtaagtatgtgctcacttcaaggcatacatccttaaaagagtactcctatgaatccattcaatccaactcctcgaaccgggagttctggctcttgaactcaggcacgaaggctttcatctccctcaccatcgagaggatctgaacacggagggacaattcagttaatacattaatatgttctactacgtccttatagtcatacttacgtacggcggccacccgaatcttctcgtgaggggtctctttcgtgttctccttgttgttcagtagctcttcatacagtttctcgccggggcggagacctgtgtacttgatctcgatatccttgtctacctgtaatccggacagctcgatcatacgcctcgccaaatccgctatcttcaccggctcacccatatcgaagataaaaatctcaccgcccttacccattgtaccggcctctaataccagacgacaagcctccgggatggtcatgaagtaacggatgatatcgggatgggtgaccgtcacgggacctccttgagcgatttgttcacggaaacgggggataaccgaaccgttgctacccaatacgtttccaaagcgggtcgtaatgaaacgcgtctcgcctttcacctctcctcgctcgatcgcaaggctcagactctgtacatagatttcggccaagcgcttgctacagcccatgatgttcgtggggttcaccgccttatccgtactgatcatcacaaatttctccacaccatagcttacagcggcatccgccatcacacgagtaccgaacacgtttgttcgaatcgcctcgcaggggttctcctccattaaagggacatgcttgtaggccgccgcatggaacactacttggggatgccagttgcggaacacataatccacacggtccgggctacggacatcgccgatcaccgggacaaagtttagtcccttgtatttctcttccaattccagacggagattatgcatcggggtctcagcggagtcgaagcaaaccaacttcttaatcgggaaatgagccagctggcgacagatctcgctaccgatactgccggcggctcccgtgacaagcacggtcttcccttccaacagattgccgatttcgtccagattaatatggatctcctcacgacccaacaaatcctcgatacggatctcacggaccgaacgcttcgcctcacctccacgtagctcctccatctccggaactaccaacgtcttcaatgaggcctgctcgcaataacggatcaaacggtcacgctcctgatgggcaacctttatattcgggaagagaacgccatccaaactgttgcgagggatcaagcgatacagatcctccacgttctcgatctggtagaccggtaactccgcgatccgaatgcttttcttggaattgccaaaggaaaggaagcccatgatactataattctgcatgaatacctgacggttcgccgaggtagcgatcatcacgctctcctcctccgtgccaaagaccagtacccgcttgcgtttcttgcctagttgcaggaggacgctgttatagacattaatcacgaagacacgcaacgtaaccaacatcacgatcgtcaacgtactgtccataattccacccaaccaatagataggagggctgaaacgggctttcaacagccaaagcagcaggaacatcaagagcgacttgccgatcgcagcaccaccaatccgccacaagccacgcagcgtggaatggcgaataaccccatgatatgctttgaacagcaagaacgaaacgatactggccacaaatgaggagaggcccactttcagcacatcagactctccaatacgtatatgcagaatggagaacattcctagtacgcccagcaacgatacggaaagcgagacgaaaaggtccgcactaaaaatgatccaacggttgatataccgcaaattcaccagacggcctaaggccaatcgccatctgcccttatgaaaatccatcatttgtattttgtttgttttatattcaatgccctaacttttcccaacggcggcgcctgtgactcgtggcgtcccgaagcggcgggcgtaatacagctttccgtccgcaagatcgtaccatcaccatggtggatgatttggatcgcatgggttgcattgggcacgatctgcacattgcaaccgtagatatggaagacgaaacgtgcttgttccgcccgctcatggttttctgtcatatcgtaattttttcagtaaggttatcacttttcgtttcccttggaaaacgaggtatatatgaattgccctatgaagtatatatcaattgcctaacgcagtatatatcctcgggcatatgcagtatatcttctcaaaaacggccagttgagcggtgtctgagacgactgctccacgcatcgttgatacgggcacggatgttgctgacgcttttacccttcgtgattcggggggtgatgggtagaaagaggcggatgaaacgctctttgaccatctcctcgggggttattttcagctcgttctcttgcatgaccagaatgacttgggccaactcggtaaccgtccggcactcgacgatctgcgcaagatagcgttccagatcctcttctttatttatataggcacgaaaacggatcgtttcaggcatgagaccggatctaccgtccccctcttctagggaggtctccccgcaatattcccccacatagaagttctggatggcttccgtagcgttggggagtatctggttattgccgccgtgtatggtaatcgttatatcagacataaggtatatatgaatcgtttgtcaatgaaaagtaaacagtttgtcaacggttatcaacggatttgatttcgctatccgggggttgtactttcgcattgtcaacaataagtttaatcttttaaaaaaaagaagtatgattaattattcaacttacatgtggaaaagtccactggatgagaccgcaaaggaacaggcgtacgccaagaaccaagtgacgaaagtgatgagtttcgatgatttcgtgaagcacatctcagatcacaacggtgttttcacacgcggcacggtaaaaggcgtggtaagcgacacctgctcatgtctagtggaacaattgctgaacggctacaaggtacaattcggcgaactaggaatctttagtatctccatcacctgcgagccggccgctacactcaaggacttctccagcgataatatcaaggcggtgaacattctattcaatccgggtatagacttcgagaacctacgttctaaggcagaattcaacctagtaaccagccgtgcgatccaagccgcctcgctgaaggcggtaaaagagaataaagacacggtggacttggctgcattgaagaaaggagactcagaatctcctgatgagatctaaatcctaccattgagaaatacggctcttaaaccatgaagcttattttattcatttatttaaagactacaagtatgaaaaaaacaaattggaagagcgtcttgctctacatcatccgtattgtcgaactggtcatcaccggtgctgccggtggagccgctagcggttggatcggatgagaaccatcacgctgattatcgtgcattgctctgccaataggcagggcagcactttacggatgatggacatcgaccgtctgcatcgctctatcggctggaatggttgcggatatcacttcgttatcccgaccgatggtacgatcgagatcggtaggccccttgaacaagtgggcgctcattgtaagaaccacaatcggtacagtatcggggtttgctatatcggaggactcgccaacgatggaaagactcccatggatacccgaacggaagcccaacgagaagccctacagggtttgtttcgtgaattgcatcagcgattccccaaagccctaatcgtgggacatcaagacttggacccgtcgaaatcctgtccctgttttaatgtcgtgaacgagttttccgattagtttaacgcagggagtcccttcacctccctcgtatgccacgcttggtaggcgggagcggagagttcaggtacagtcaataacttgtaatccgccccgttctgcttagctatatgttttcgttcatacaaacgaagggaacgatccgttacggaaaccatgacaaccggaaaaggataagcgtacaggcgcatcggcgtgatctcactatccggaaaggcacgacgcaattgataagcggaacgttcgaacgcgacccaataagatcccgtacaatataaatggatcgaggtctgattcgcacactcacgattcatgatctctctcaaatgccctttcagcaatagcatcaaacggataccggagggagtttcgctttcctttctcatgacagtctactatttaatgttttagccaaatatcgtaatcgtgtaaacgctgtatcaacaaggccttgcttctcttaggcgaagggtcatcccgccagggatctaccagctcatgcgccatacggtaatacaggttgctattcgtgcagccgtaaagcgtgacgagcagcaaggcacgagaattcactgccttaaccaatggaagcatattgcgtagggtggaatacaagcgttcaaactcctcttcctgatccaacagcttataggccggaaggagtaatgagtaaaccttgcaacgcatcacgtcggtctccacacgaagggaagcatagcccttcagcacctcacgaaccaaaagttcgtcttcctttcccaatttgcccgagagataataacgccccaacgccttgtgcataccttccgataaacgatcgttatccaaatgggtataaacatgcttgcctttcgtattcaactcgatcagctcatactcgccttgccttacctcaaatagaggaacccacatacagtcaaggatacgtaccatgacatccttatgacctccacccggttgcaccaccacctcagcctccatccccatgaaagaacccgaggtgatacgtacacggtcacctttcagcaagcgaccgctatccggtacgtacaccggaagctcattggaataagattcagccatccagcgtaaggtctccatctcatgatctgacaggtaaggaaaataagagtgttcgcccacggatacccgaggaagaagattatataagggcatgatacgtttcaaacggaaaatctcattctccgaagcatggataaacacatagttgtataaaagaggcttcctcgtattgaccatcttgcctcccaccttgcgagcctcgacatacgagggggcaaagtactcgaacaagggttccccacaacgtttacgacgggaaagctcggcatctaatccttttgacgaatagatattatcacgtcccccaacagcggtaggaagcgtcagtacgtaccagcgtacagcctcctggctacggcgattgcgtatatgcaccatagctctatcagagctattacttgtcacgatattcattgaggaagataattcagagccttatcaagatattcttgtaataccctgataaataaatacttatatgaaaacaaaaaaggaattactgaaaatttgcatcccttcaatactcatgctacttggcgagtagccttaacaagaggagtgaaaggatattccttagttgtagagacggagcgtgtcccgtttcatccccttacaatggtattttagttactatcaggcggtgggagacggagcacgctccatctctacatgatgttatatggaatttacttcggataacgtgatgatttcgggaataacgaggccatttcgtttctattgccatgtctatacatcagaaataagaacgaagatttaaagagaattaaggttgaaacacaaacaaagcctaatgtttgcttgtgttatgttattttttactacatttgcggcatgaaatgaacgctactcgccaagtagcagtcagtttggctactcgccaagtagcgtacttttcttcaccctactttcggcgcataattatacacactctcgaaacaaagtttgtttacggttgagagtttttctaaagagaaactcttcaagtatatttgcgtagtcttgatagatttatgccctaacagttcactgatcatctcaatcggtacgttttgctccttcaaggtcgtggcgaaagagtgacgaatcgtgtatgaggtaacccgagtatgaatgccaatggattccgacagtattttcaatctgcggttaaaacctcctaatacggtattatattccttgtaggcatcctcaccggtcttcattccctctaaaaaaggaaacagatagggcgaatcctcggttgcatcggctgccaactcattcagcagcccttgtgcctccgctgggatctccacctgtataagggatccgcttttctgccgataataagacaagatcccttccttgatatcctcctttcgcaaatgcgccaaatctacgaaagccatcccgcaaaacaaaaacatcaggcaaaaggctgattgggtcctcttctgttgcggatctgtcaccgggcttgtcatcagcaagcgtaagctttccgaaggcaacgcctttttacgtttactctcaacccccgtaaacacatgcttaaacaaatgaggaatataggcagcctcacccacctctaccgctaaattatagatgtgacgaatccggcgcatataagtagataccgtgttacgagcacatcccttggccaacagccaagattgataacgcaaaagtgtatcccgattaatatacgcataaggaatctcttcccggccacaaaaacatttaaacgacctcaacgcatcttgataactcttcgccgtggaataacgctttttctcacgcaggcaggtgatatacgtaagtacacccaccacaaaatcattctcattcatactttatctccttaagaattaatacataaaaaaatcctctatctctcgtttacacaggaaagatagaggatcttcataaaatccttaaagaaatatattattttccggctttctcagcagcagctttcttattgatcttcttcttctgcaactcgtaagcgatcggagtagcgacgaacaaagtagagtatgtaccgataatgatacctaataagatagcgaacgtaaagcttcggatcgtgctaccgcccaagatgaagatacacaatacaaccaccaacgtagtcaatgatgtattaaatgtacgacacaaggtagagttcaacgcatcattgatcacttgataacgatcacgcttcggatacaaagcgattgtctcacggatacggtcgaatacaaccacggtatcattgatagagtaaccgataatcgtcaagatagctgcgataaacgtctggtctacctccattgagaacggaagaaccttccataacaaggtatagaaagaaatgatacacaatgtagtcgtagcaacagaggcgaacgcacccacagagaatgacacatcacggaaacgaagcaggatataagcggccatacagatcatggcgaagattaccgctaagatagcgctattcttgatatcgtctgccatgctaggacccaccttctgcgaactctgtatgaaagtagtcgtgaactcatctaatgtagttccttccggaagtaaggatttcacgccctcaaacaatttattctcgatctcttgatctaccgtaggatcgttatcattgatcttatagttggtagacacacgtacttgatcagctgtaccgatctggataacactaacagaaccgtctaactgagcgtccagcatattacgaacatcgtcagtcttcacctcttgattgaaacggatcacgtaattacgtccacccgtgaaatcgataccattattcaagccgatcgtcataaaagagatagcacctaaaacgatgattgccgccggaattaaataaccgactttgcgagcacccaagaaattgatcttcgggtttgtcaacaagtctttcgtaatagaagtcgtgaatgtcacgttcttcaatttatctttcgctaacaatgcctcataaacgatacgagtcaagaacacggctgtaaggaatgaagcgaacaaaccgatgatcatcgtcgtagcgaaaccacggataggacccgtaccgaaatagaacaatacgataccggtaatgatagatgtcaagtttgagtcgaagatagcggagaacgcattgctgtaaccgtcggcgatagcctttcctaaagacttaccggcacgaagttcctctttcgtacgctcatatatcaatacgttagcatcgactgccatacccagcgtcaacaccataccggcaatacccggcaaggtaagaacggcttggaaagaagcaaggatacccatcgtgaagaagatgttcaataccaaagcaccgtcggcgatcaatcccggaatcaatccgtagaatgcgcacatataaaccatcaacagcaccaatgccaaaacgaaagaaatcacaccggcattgatagcctcttgtcccaaagacggaccaacgacgtcttcttgaacgatatgtacggaagcagccatcttacccgatttcaatacgttcgctaagtccttcgcctcttccggtgtaaagtgaccggtgatttgtgaacgacctcccgtgatctcatcgtttacgttcggagcggaataaaccatctcatccaaaacgatagcgatctggcgaccgatattctctttcgtcaaacgagcccaagccttagagccttcggcattcataaccatgttaaccatctgctctgaacgaccggcttgttgcataaagtcagcgttagcatctgttactacgtcaccacctaaagcgggacttccgtcacggttcgttaccttcaaggcatataactcaaagaactgctctttatcatcgatcgcctttacaccccattttaaagccaagttacgaggcaatacctctttcacttgtttcatgttcaggtattcgctgatcttctccatatcttttgcttgagcgatacctaccgtcgaacccggagacaactgaccgttgtactggctaatctgcaataaagcaaataatggatgttgcttagcgaactcttccatgctttgattagcttccgtatcttttttatcttgaccgagctcagccaacaaagaatcggcctcacttacattcgcatcagcggcatcagcgattttctcaacattatcggtagcaacagaatcagcggaagcctccttacttaggatagtagccaatacattatcagcggcaaccaattgttgatagatttccggcaacttataagtttcccagaattccaagttagcgctaccttgaagcaacttacgaacacgttccggttctttcacacccggcaactcaaccaagatacgacccgctgtctccaaacgttggatgttcggagaaaccacaccgaaacggtcgatacgagtacgcaatacgttgaatgagttatcaatcgcactctgcaactcttgtttcaaaacagaaacaacctgagcgtctgagctctggggcgtgattttatcttttaactcgaatgtactgaaaatagcggaaagacgtgcgccgctatccaacttcttatactcctcagcgaaaaggtcgatgaaatctttttggctagtcgcttgatgcgcataagctaaatccaacgccttgttgaaattctcgtcttggttgttgttagacaacgaacggattacatccgccacgttcaactcaaggacaacgttcataccgccctttaagtcaagacctaaactaatttccatttcacggcattgcttaagcgtatagcctaaccataccttctgagtagatagtgagtctaaataagcactctctttcgcaggatctccacccgcatactcagcggctttactgttgtaatgttgcgtcacgaacgagaacgacaaatagaacaaacagacaagcgtaagtaacaccgcgaagacctttacaaatcctttgttttgcatctgaatcttaggtttatgttattacattatttatattcgttttttcacagggtgcaaatatagactttttttctttgataaagagcaattagtataattatttgtcacgctcatagtttatttcaaacgcaaatgtatatctttggggctaaaataataaggaaaatataccatgaaacagttattattcgctctgttatttatccccgccctgctattcgcacaagaggatcaacactatctggcaggggccgttccggttgcagacggtaaagtcgtttttacccgagagattaatgccccctctttaagcaaggcacaaatctaccaacaactattaaaatggggacaagaaaattttaacacaaaggaaagtagagtagcttatcaaaatgaggcaaaaggcgagatcgccattatcggagaagaatatatagtattctccagcacagccttatccctcgatcgggcgatgatgaaataccgtattatcattgaatgtaaggaacatgcttgtaccctgcaacttgcgggcatccgatatgaatataacgtgtcttaccagaacgagccggagaaatacctagccgaggaatggatcacggacgagtatgccttgaataagagcaagacgaaattgaaccgtatcagcggtaagttccgtaaggccacgattgacttcgcagacaagacgttcgatagcgcaaccaacacattaggcgcacagttgctgacaaccgcaccggtagaaccagtatccgctccgcaacgggaaacacgagctgtggcaccgatggaaggtttcgtagcgttccaagctgacaaaatacctagcacgatcctccaaatgttaccggacaacgctttacaaatcaaagccgtaaaaggaaatacgaccgacgcaaacgttgaatggaaaggcataggcaatatgttcggtaaaacgatcagtacaatctccatatccaaagatagtcctgcttataaagcgattggcaataacgatgtatatcgattatccttctccaagcccggcacatctgccgatgcgccatggattattatcgagtgccgtaaacaaggcgagacctccgaaggacagcaaacgatgttaatcggcgagattacgaatgtatggatcaaataacgaaaaagagagttgcatttatgaaaaagattctattattaatatatatgatgttccctgtgctagtcatggcgcaggggcataaaggcgaggtagacgaatgcgcccccatgaaaaacaggaaggtatgctatagcgatgatgtagagatcgagaatacctctaaactagaaatattcaacgctattaacgcatgggctaagaaatcttatggaaaagatgtcttcttatccaacgtaaactcgaacaagaacaaagggaccatcttcgtaagctctaaggttgaattattgttgaatgatacagacaagactatcattaaatataaaatgcgtatcacctgcttcgacaaccggtacacgatcgaggcgagcgatatcgtatatcaatatgatccgctaaacgataaaaagtacaagacctataaagcggaagatgtaatcgccaataatggggatagcaatacgatagcgctgatcaaagatcctaagctattctgtaacgctaccttcttctttgtcgagaacttgttcgccgacgtatttgacgctgcgcagaacgcagaatccgagtgatgaaacccttttattcaagtttcagataacaccataacgggtagtggtctgaataagcgaccttatccacggaacaattcatagaggtcatgttcggggaatgcaggatattatcgatacggaaccagaagaaattttgattataggtaatgcccattccccggccagactcggcaaaggcatccgtcaaatccccttggatcgtacggtgcgcataagaaataggcgtatcattaaagtcaccgcataccaagacataatctcctttcgcgttcttaatctcttttgataccgcttccgcttgcttagcccgaatccggaaagcaggtcctagcttttgctcgaacgctcctttcaaatcgtccaacccatccgagctaaagctctttataagggatgaataacgggtccgatcctccatcgtcagtttaaacgattccaaatggttattaatcaaggtcaacttctttcccttgatgttcacttcatgtacggaagagccgttataatccgaatcgtatttcaccatccgggaattcgacagcggatatttggagaacacagcgatgccgaaactctggaatttcgtggagctttgataaaatacagaacgataaggatacatgctcaacgcatcatagatcttagaggcagtaaggctcttctctgatttagccgtggcatattcctgcaaacaaacaatatccgcgtccgagttagcgatatattggataatcttgttcggagctatcttcgtatgattcttgtacccaaaagccatcacattataagtcagcaccttcagtacctcttcccgagggacatccttatgcgagtgaaacggaaaatagcgtttcacgggaccccaacataacaagaaggagaatatgccgatcaataagaacttccattcccataagaacagccaatagataataaagcaaagattgactacacataagactggaaaggctaatcccagataagataacgtcatactcgtctcaggagacacccgatccgagtaagccgagactatcaacaacacgacagccaccacattcgctacgacaaataagaattgaagaaaaatccgtagagttttcataagtatctgttatttcttactggcgtcgaaaagtcgctttttctcttcagcggaaaggctctcataaccggaacgtttcaatttatccagtatagtatctagatccaccgactcctgatgtttgcgtgcgttatactcataatccgtttcgttacgtttataagtcacacgcatcttcggtttccgtttgcccaaattcacgaaccagtcgatcaaccgattcattggagcggtcaagtcctttccattacgaatacgggaagcgaaccacataccaaacaaagccccgccgatatgggcgatatgtcctcccgcattatcagaagtcatcgccaacaaatcgatcaccagcgtaaagatagccaaataaattaatttgatccttccgatcaagaataaattaatctccaaatccttccggtaaaacgacacggcgaaaacgatcgccataacagatgccgaagcccccatcaaatagctaaaagaagccacgttctggaaataagggaaaatattataagcaaggacaaacaatatcgcacccgcaagacctcccaatatatacaagcctcccaactgccgctcattgaagaaattcaagaacaatcccccgaaccaatacaaccaaagcatattgaacaagatatgcaagaagtcaaaatgagtgaacatataagtaaacaacgtccacggacggaagagcaaaagttccggagaagccggtaactgcaaatactgcaaaaaaggtaccccttgcacattaaagagcataaacaatacgctggccaaacgtatcaagataaacaagcctacatttatatatatcagtttcgacaggatattacccgactgaaacatacgcttcaaattagtaaaaataccgtccattgtctgcatctttctttttccaataacgaattaggaaataaccgaataacataccccccaaatgagcgaaatgcgctaccgtatcgccaccaaaactagccacacccataaatagttcggcaagaccataaaatattacgaaatatttggctttaatcgggatcggtatgaacatcaagtacaaaggaacattcgggaagatcatcgcgaatgccaacaagattccgaatacggcacccgaagcgccaatggtcacgaaataattcaagaactcgcttttgctgataatctgggctccattcaagtttatcatgtcttggctagcgaagatcacatcccgcaaattaaagaaccataccacctcttgtaccaaaccggcgcctatacccgtcacgaagtaaaaaatcaagaaacgtttggggccccatacgttctccaatacccggccgaacatataaacggcgaacatattaaaaaacacatgcgcgaacgaatgggtatcgtgcatgaacatataagaaacgatctgataagccttgaagtcggtagcacccgggaagtgaagccctaataaatccaccaaatcgatgccgactttcggcagtgcaaggctggctacccaaaatagcaagtttataatgataagatttttcgttaccggcgggatactattcaagaaccccgaatttgtctgattcatcatatactacgttaatttagcggcaaaggtaaatatattttagccgtttttgcccataataatactaaaacatatgtaaatcggtaaaaaaagtaggtttttcttttgtgatatttcaaaataaaactacatttggagccgtctatcggttatcatagttttgtttaatatattaacagtcaaaccatcatgaacaaatcagaatttattagtgcagtcgctgaaaaatcaggtctcagcaaagtggatgctaaaaaggcagtagaagcttttgttgacacagtttctaacgaattaaaagaaggcggtaaagtcgctctacttggcttcggttcattctctgtgtcagagaaggccgctcgtaaaggtgttaacccgaaaactaaagaaaccattgaaatcgcagctcgcaaggccgtgaagttcaaggctggtgctgaattgaacgagctaatcaaataagaaacaccattattctctatagaagaaggatacgatgcaaattgtatcctttttttgtgtaccttcgcgtgcaaataaaatccgaattatagttagacgaatatggttatcgaacaacagattaccggggctatcatagccggcatcaaagagctgtacggagcggatgtcaccgctagccaagtgcagttacaaaaaacgaaaaaagaattcaaggggcacttgaccctagtcgtattcccattccttcgcatgtcgaagaaatctccggagcagaccgctcaggaaatcggtgagtacttgttgagaaacgagccagcggtagctgaattcaatgtaatcaaaggattccttaacctgacggtcgcttgctcttgctggatcgatttactaaactcgatcaataagcagcccgcttacggtatcattccggttaccgagcagtcgcctttggttatgatcgaatattcttctcccaatacaaataaaccgcttcacttgggccatgtccgcaataacttattaggatacagcttatcgaagatcatgaaagcgaacggtaaccagatcgtaaagacgaatatcgtaaacgatcgtggtatccatatctgtaaatccatgttggcttggcagaaatggggaaatggagctaccccagagtctaccggaaagaagggtgaccatctgatcggtgacttttacgtattattcagcaacaaattaaaagaggagacccatgcgttagaagcgaaaggccttaccaaggaagaagccgaggctcaatccaccttgatggcggaagcccgtgagatgcttcgtaaatgggaagccggagacaaagaggtgcgtgcgctttgggaaatgatgaataattgggtatacgccgggttcaacgagacttataagatgatgggcgtagatttcgataagatttattatgagtctcaaacgtatctggaaggaaaaggtaaggtgatggaaggcctagagaaagggattttctatcgccgtgaagacggctccgtatgggctgatttgacgaaagacgggctggatgagaaattattgcttcgtgcggatggaacttccgtctatatgacgcaggatatcggtaccgccaagctgcgcttcgatgattacccgatcaataagatgatctatgtggtagggaacgagcagaattatcacttccaagtattatcgatcttattggataagttaggcttcgagttcggcaaaggattggtccacttctcctacggaatggtagagctaccggaaggtaagatgaagagccgtgagggaacggtcgtagatgccgatgatttgatggccgagatgatcagtaccgcacgtgagatttcccaagaattagggaaattggacgagatgactccggaagaggctgagaatatcgcccgaatcgtaggtcttggctccttgaaatatttcatattaaaggtagaccctcgcaagaatatgacgttcaacccgaaagagtctatcgacttcaatgggaatacgggaccattcatccaatatacctacgcccgtatccgttccgtattgcgcaaagcggcggaacagggcatcgtattaccggagcaattaccgcttactttcgccatttccgagaaagaagagaacctgatccaaatgatcgccgattatgcggagatcgtgaaagaggcaggtaagctatacagcccggcctgtgtcgccaactatatttatgatctggtaaaggaatacaatcaattctatcacgatttctccatccttcgcgaagagaatccggaattgaagaacttccgtttagtcttatccgccaatgtagctaagatcgtgaaatccggtatggatttattaggcatcgaggttccggaaagaatgtaacgatagaagatgaacataaacgagaaaacaagaaaggctctccttcgatttcaacaaaatgaaatcacggagagccttctctatacgcaactcgccgctatcgagaaagatccaagcaacaaggaagtattactacagatagcgaatgacgagaaaggacattatacgatcctgaaaaagtatacggggcaagagatctccccgaataaattacgtgtcactaaatactactggttggcacgtatcttggggattactttcgccattaagctaatggaaggtagcgaggaaagcgccaagaatgattacgcctcttatgatgagtatccggatttgcaacaaatcgcacgtgacgaggatgagcatgagcagaggttgatcgccttgatcaatgaggaacggttggaatatatgggttctgtcgtactggggctaaatgacgctttggtagaatttacaggtgctttagctggctttacccttgccttgagcgactctagattaatagcgttgaccggaagcatcactggaatagccgccgcattatccatggcttcctccgaatatctatctaccaagtccgagaatggaaatgaaaacgggaaacatcctgttaaggcatcgatctatacgggaatagcttatatctttacggtagtcgccttggtcgctccatttatctttatatcgaacgtattaatggctttagggcttatgctcatcatagcgttgagtatcatcgcccttttcaactattattattccatagcgagaagcgagagtttccggaagcgttttactgagatggcagtacttagttttagcgtggccgcattaagcttcttgatcggatatgcgttaaaagaatttacgggcatcgatgtctaaaaaaatcatagttatgttttgaaaaattcatagttatgagtttagtaaatcataactatgaatttttagagcctataatcaagcctttttccgtgtcgtacgtttcttcgtcgcagcaggtttttctcccgcctcggcgattatcttctggcattcctccaaggtcaagttctccggtttctctatcgtcttaggaattctgtaattctttttcttataagagatataagggccgaagcgaccattcaagatctccatttccggatcctcatcgaacttcttgataaatcgttgctcatctttttgtttttttgcctcgatcaactcgatagcttcctcggctgttatcgacaaaggattcaagcccttcggtatggatacgaactttccgtcatgacggataaacgggccaaaacgtccgacagcggcaaccatgaccttaccttcatattcaccgatcgtacggggtagatcaaacaatttcaaggcttcttccaaagtaatcgtctcgatagattgccccttcatcaaggttgcgaactgaggtttaggagcctctttatcctctgggtgcgcctgcccgatctgtacgactgggccataacgaccgatcttcacgaaaacaggtttgccgctcttcggatcgatacccaattcacgctcacccactttatgctccgtacggacagaggctgcctcttccacgatcggatggaatagtttatagaatttatcgatcgcgtccgtccataccatctcgccttccgctacggcatcgaattccttctctacgctcgccgtgaagttataatccataacgcccgggaaatactccatcaagaaatcattcacgaccgtaccgatatcggttggcatcaacttattccggtccgctcctacgatctccgtcttttggacttccttgatcgtatgctgagccaaggttatgatattataagtacgctccgttccttccttatcccctttcacgacatactctcgattctgaatcgtctggatcgtaggcgcataggtagaaggacgaccgattcccaattcctccaaacggcgaaccaaacttgcttccgtatagcggggaggacgttgcgtgaaacgttcggtagcgacgatatccttcatactcaatacctcgttcaaggtaaccggaggaagaaggccgttttcctgttccttctcattctcgtcatcaaaactctcgcggtacacctgaaggaaaccgtcaaaagtaatgacctcaccggtagccacgaacttctctttcttgccgccgatgcctacggagatcgtcgtacgctccaactcggcgtccgccatctggcaagcgatcgtacgtttgcggatcaattcgtataatctcttttcctgagcggtcccgcttatctcatcattgctgatataggtcggacgaatcgcctcgtgcgcttcttgcgctcccttgctcttggtatgatattgacggaatttataatatttctcaccgtaggtatccaagatagcttcttttgccgtccccaaagccaaatcacttaagttcacggagtcagtacgcatatacgtgatcaatccggactcatacaggcgttgggcgatcatcatggtctgcgagaccgaataacccaacttacgggcggcctcctgctgcaaggtagatgtcgtaaaaggaggggctggtgttttacgcaccggctttttcgagatatcatcgatcgtgaaagaagcgtccttgcaagattcaaggaatgcctccacctcttccttatctttcaaacgacggttcagctccgccttgaggattgtcgtaccatccggcaagataaagctagcgatcacacggtaggcggcctccgagacaaactcgttgatctctcgctcccgctctacgatcagacgtacggcaaccgattgcacgcgccccgcggataaagccggcttcaccttacgccaaagaatgggggatagctcgaaacccacgatacggtctaagatacgacgggcttgctgcgcgttcaccaaatcgatattgatatctctcggcgtctcaatcgcatgtaatatagcgttcttggtaatttcatgaaaaacgatacgtttcgtattctcaggtttcaatcctaatacctcatataaatgccaagagatggcctctccctcccggtcctcatcggaagccaaccaaacctgctcggctttcttggcttcgttcttcaattcggtcacgagtttcttcttatcagagggaatcacgtattccggggcataattgtgttcgaggtctatactgaaatctttcgttttcaagtcgcggatatgaccatagctagacataaccttatagtcctttccgaggaacttctcgatggtttttgccttggcgggtgactccactattaccaaattcttttgcatatctattttttgctggttagaaatcgggtgcaaacttacacaaataattaacgtacgcagtatatcggtcactaaaaaagcgttttttcctatacattatatatatagtcatgcgtttctatttaccttcgcgggacaaaatcaaaaagctattcaaaaatatggaagagataaagcgacttatttcagagaataaactagaagaagcgatccggctcttggacgcttacctcacggagcaaccgagatccgacgaggcttggtttctcctcggaaaagctcattataaactaggcaacgtacgcctagccctcaacagctacctgcaagcgatagagatcaatccggaaagcccggcacaagcggcctacgatatggcgatcaaggtgctggatttttataataaggatatgtacaaccattaagaagacagagcacccgcacccaaataaattctagaagtacaagtaactcgactttatgcatttatgaagttagttgttattgatatagcgtttattcgtataatgctcatttacaacctataacgtaagctcgtcataataggcatcgttaaaggcttacaatgggcattataaagtgcttataatgggcattcttagcacctaacattgcccatcgtaatttgtagagacggggcgtgccccgtctctacaagttatacaatgaatttatgtttctttagatttcaatcttccatgagagtaatcgtatagtcatgcagacagaagaattcctctgtcaacatagtaggtggaatctttccctcttccaaggaatagcccactccactgaaacgaacattcagcccctcctgctgataagccatcggcatatcctccacatagtaattacccacgaaatcgattggtttggaacaaactatggcccatagattcacccgatcgtcccaacgaatacgaccaaactcatcaactagatccgtccttcgcccatgctcatgcttatcctcatgctcatcatcaccgcaagcggtaaagcctagcatggtaatagtacacaggcaaaatgataaaaatacagaaaatgcttttttcatataagtaaactttaagaaattacctttatccagatgattatcctttataagtcagcgccaacatcgtaatatcatcgctctgcgtagcgccgttcacgaaagattggacggattcggatataccttcgatcatggatttgggggattggttctttacggagctacaagcctctaccaaacggatatctccatattgctcattccgcaggttcatcgcctcactgattccatccgtatagaggaacaagctgtctcccgcttccagtttcaaggattgttctttataagctaatcccggcacgactcccaaggccatcccaccagtcatcggcaaaagagataccttatcgttcttacgaatccaaaccggacgattatgccccccattgcaataaaccacgtcgcccgtatggatattcaagattgcgtaaaaagtagtaacaaacatcccattgacactctcacggcacaatagatcattcgattccttcatgcagaccgccggggaaagctgcctaagcgccgtagcacggatcaccgtacggctgatcgccatgaaaatagcggcgggaatccccttatccgacacgtcagcgatcgtaaaacccagatgattatcgtccaccaagaagaaatcatagaaatcaccccccacggccttcgctgcgctcatggtcgcgtagagatcgaattgcttatattgcgggaacggagggaactgcttcggcaagatcgattgctgtatctcacgtgccacgttcaagtcgtattgtatctcctctagctgatgatgttccttttgggcctccttgataaaagaaatctgctcgaccgccttctcgatcgtacgttccagatcctccatatcgatcggcttggtagcgaagtcgaaagcaccatggttcatggcggtacgaatattctccatatccccataagccgatacgatgatacatttcaaggccgggttacgcatctcgttaatcttcgtcagcaatgtcaagccatccatctccggcatattgatatcgctcaatatgatatcaaagtccggatggtccaacatcatcctcaacgcctccaaaccattatgggcaaaggagaactcatactctcccttacggatcttccgacggaaatattgggttagcaacgcttccagatcctgttcgtcgtctacgcttaatatcttgatcgccataattcttctgtttatttcgttaatggaataaggaatatgaaacgggtaaactcaccctctttcgattccacctctatcttcccgtcatgcttctcctctataatggatcgagtgatagatagccccaagccagttccctctcccaccggtttcgtggtgaaaaacgcggagaatatctgctcccggatatcctccggcataccgataccattatcctcgatacttaatcttaaagaatctccctccttccgtagatccacggatataaccggctcatacccgatcggcgagagcttggatttactatagaccgcatagcaagcgttattcatgacattcaataccgcacggctcaaatcctgcgggatcactttcagcatcggaagcccctcctcgtaatgctcccggatcgcaatattgaaacctttatagttcgctcgcatcgaatgataagccagccaaacatattccttcaccagattcttgatatccgtagggatgtactcgtcatccttccctctggaataaagcaagataccccggatgatacttgtcgcccggtttccatgttcctcgatcttcttcaagttaccatgcaaatcgttaacgatctcgctaaactcctcatgcaaggcggtcagcttctcccaagattccggaggcaagacatctttctcttcttctaatatatcttccaagtcatccactaacttagaggacagcttactgaaattgatgacaaagttgagcggattctggatctcatgtgcgatcccggcactcaacatacctaaagaagataatttctctaagttcttcacttgcaaacgtagccgttctatttccttactctggtcttccatatctattcctcctctttaggcggtgtaattgttttcggttgatatacagggatcgtaattagaaactgggtatattctcctttcttactctccacctcgatggttccccgatggttttgcacgatctcacggcataggtaaagccctacgccagccgcttcccccgttgtctttgtcgtgaagaaaggagcgaatatcttatcttttatattctcgtcaataccggacccgttatcccggatcgttatttccagcatatccttattgaccttcaatccaaggaatatctccggactaaaagtcacggtctccgatttcttcaacagggcatacatggaatttttcaatatcccggccagaaccttactgaactgctccacgtttacctccatcatcaaagacagcgtcaaattatcgaaaataatccggatattcttctcttgaatatcctgctcatacgttttcttcaatttatccaaggcgatccggcataatccgtttatgttggtaagcgtaagattacctcttcggtctttcagcaattcctccatcgccttaacgatacggaccgtattgaaaccatgctcggagatcttctccaaattactggtcatcatattcaacaaatcaaccgagtcgtcatacacatccggtttcagatgctctttctgactatccagattttcccggagatccttggccagccccgatgtcaaattcgcaaagttattgatataattcagagggttcaaaatgcggtccaccaaaccttgagtcaattgtcctacggtagccatccgttccttacggaccagctcgtcctgcgcctcacccaaggctttcaaagcggccgccaatttctcggattcctcttggatcgcgtctttctccgaacggatctcctgcgtacgctcctctacctcttttaccaaatactctttttgtttgagtttccgcttgaaaaccaacttagagatctggcaaaacagaatcaagaaaagcaatccgatccattcttgatgaccgaacttcacagatacacaaataccgaccaagctacccagcgtaacccgctcgcaaagtttaatccgcctttttaaccgatcgatctcggtatgtaaatcctgtatcatgatgaacctcctttcctaactataaataggcaacgtaatcgtaacttccgtatatttatctttctccgactcgatagcgatcgtacccttatggttcaacacgacctcccgactcaagtaaagacctgttcctgccgcttccgcggtcggtttggtggtaaagaacggagaaaagactttcgtctttatcgtttcttctataccgacgccattatcacggataaccacttgcaacttatccgcttgaatacgcaataccaacgagacagaaggctgatatcccggttccccgagctttttcaagaccgcatatatactattatccaatatctgcaacaaggcttttcccatctgatcgatattcacctcgattgtcaacggtacggaaagcccggagaatgatagatctacttgattcttctcgatctccttcgcataattctttcgcaagatatccagattgaccttacataaatcattaatatccacgcaggttcgattcgccgaatgatctttcagcaattcttccatcgcttttacgatccgcaccgtgttatcaccatgcttggctatcttatccagattgccagtcaaaagaaccagcagttcttgcgtatcattataattatcgtgtttaccggtctcttcgtcctcatcgatattctgcttgatatctttcgctaatgcagcagacaaatgagcgaagttattgatataattcaagggattcaagatacggtctaccagacctttcgttaattggccgatcgatgccagacgttccttacgaaccaactcgtcttgagcgtccgccaaggcagaaagggcacgggatagtttctccgactccgcttgcatcgcatcccgctggaaacgcaattccatcgtccgctgttcaacgagattagagacgaactgtctttttcgcagacggaattgcgtataatactttaacaggaatagaaggactacggctcccaccaaataataaaccagttcttccttcttctggtaaaccgccaaggcgatccacgccgtcccgatcacggtcagcgtctcgatcacccgcatcctccagcgaaggctttccagttgtttgatatttatgtcgcccatccttcctgtcctccggatatcagaaattgatattcacgcccaacatcgcattaaaactctgcatcggataaccgtaatacagttcgtacttctggcaaagaatattggtcaacttggcataaacaccaaagatatcgttgaaggtataggtacctgttaggtttagctcgttgatgttatccatcttaaactcattcattttatcgtacgtcataccagtgttcccattgacaccccaagtccgtacattcgcataacgtccggtagccaaataataatccaaagcgatagataatttctcaatcgggcggacggtcaggttcgcattcagttccatttccggcttcccccacgcatgaggcaactcgccttcatccgtttccgctttccaattattatatacacctttcaaagcaatatcgaaccattgttgataactatacttcaagttggctcccacgaaaagttgcttcgtgtcgatacccggctccgcaacactgaaactgccgaaataattcgctgaccaaacatcagactgagtaaacagcacatcatcgctcgttatcttatatccggcgaacacatcaaaccaaaagcccggtgccacgccgctccggatacccaagacagcgtccagccaattgcgcgagggcaatagttctgccatcgggtagaggtagcggttcacacgcgacatctcgtacatgctgttggagtacatcttgccgccagcgttcacgtatagctccgtcttgtcggccacctccacatcggcggctacattcggagaggccatgaattttgtctcgtcgcccgtagccagcatcacgttcgcacccagctttaaattccaattatcaccctctaccttataataaggcgacaacatcgcctcgacatggttcttgaactcatattcataacctcctacctccggcaaactgtaattgaaatattcgaccaaaccgcccaagcctactcgcatattcccattgaaaccagcgttcagatcaaactttgcctctagagtatgctccgtagggccgtccatcaccctacttaatccatatttatgcgagaaattagtataacctaagtccaacaaatagccaacctcagcctcctccttcgactcgaaacctatcgtagcagcgatcgtctggttcacttggttggtttcgcgatctctctgtaacaaatcctccgaaggggcataactggatgtaggatcagacaatgccgccccataataattgaatgcggagtagccgtacttcgctccgatactgaatatcgtcttctcgaaagcgtgcttgtagttgatgcctcccaagttgtcattgattttcgccttgacatcataatcctttggctttccgttcgtggagcgatgcgaataccatagattcagctgatccttctcagtactcaggatatgatagcccaagtctccgttgatattcatgcgcgtacccataccaaagttaaaatatccccgacgcttgttgtaatccatctgcgtcatgatatttccggaaggcaacaaactaatctctttctgcggatcggcggcgatcgtataattcgagtaatcgatcgggatcttacgaacctccggctctttcaccacgggaagcgtatttaccttgctagcgtcctgcacggaaggatcatactcccgttcaagcgtcatctctcggttcaggttcttttctttcgtaacatcctcttgcgcactcgcagcagcagccgaacccagcaaagctaccacacacaacgcctttacattatatatagtcttcatcgctttcttttatttctttagtttacccaatctgtcttcgatcatcgcggcgatctcatcatcgcccttgtagttgttttgcaaactggtcagatattgacgagcttggaaatcatcaccttggcggatataaatatcagccaacaagataaagccccgtgccaaccaatattggtgaggcgtaccgttctcgatgaagttcatcaagacagtctcggcattcttatcatccttattatcataatacaattgagccaatagatatttagcctccgccccgtgtatcgtacgggtatccttgctgatctccttcaagtcggccaacgccttgttctcctgcttcaagctgatataagccttcgcacggacataacgggcctcggacataatctcgggagatagcttcggttccttcagcaaatcgttggcggcaagcaaagcctcttgcggctgaccggtcaactcggcgcaacgcatcaagcccaatttagcggcctccttattctccggattctccgctaccgcctgtagatgcttgaaactttccatagcggcggcgtaatccttatccagatactcgatctcagccttacgagcccaagactcttccctgaatttcgtatcaccgctctccaataccaacgagaacagacgtttcgcctcctccagatctttcttggcaaaagcgatacttgccaaatagaaattagcgttcgagctaaacgctccctgcgggaaggtttgcaaataattcgtcaagctacgacgagcgccctcattatcgcctcgcataaataacttctcggccgccagataggtcaaggagtcttgctcactcacctcgaaacgaacatttccacctaacgaattcgcataggcggcaaacgaattgatatcgttcagctcgatatatacggacttcaaatcttgcaaggccactttcgcctcctcgctacccggataattgctaatcacgctcttataagcgtcggccgctttctccggctgattgtcgttgaagtaaatcaaaccaagctgtacgccggccttacgagccagactgctttgcgggaaatcacgcatcaattgctcaaagcttgccgcagccgcttgattattatccaataacacgtaagaacgtcctttctcaaacaaggcatcatccacatattgtgattccgggaactcacggatcaagcgatccatcacgctgatctttcccttataatctttctgcaatcccagcaagaagcccttctgatacaccgaataatctccggcggacggttgcaattgcgccgcacgggtataattctcttccgccatagcgaactgacggttgtggaataaacaatcgccgatacgattataagcgtccgcataagccggagtctgctgattgctttccaaattcacgtattgacggaaacggttcaacgcctcgccatactctttcaatttgaagtagctgtaacctaagttataatgtgccaaggcatacatatccgtattacgttggcgggtattattcaaataggtacgataatcggaaatcgccttgttatactcaccttggcgataataagattccccacgccagaaataagcgtcgttacgagattccagattataagcgcccaacgagatcgcacggctgaaaagatcgaccgccttatccaattccatattcgtgaacgcctgcgttcccaactggaataagatatcttgcttcgcctccaagatcttcgtgctcggatgcttgatcttatcgatagagttcagagccgcttgatagttcttggtagtcaaataaacctccaccagataatcgtttaccttatcggcatatttggaattcggaaaatcattcaagaaatcctcgaagattgtcaccgactcgccaaagcccgtgaaagcggtctcgtggatcaataaagcgtaattatacatagccgcctctttcacttgcttatcgaaagaagaagtcgcggcagcctcgaaggccatacgggcgttattcttatcttttaatttcagataactttgccccagatacagataagcgttctgcgaaagggcatcgttctcacgtacggtccgccccaaagcgttcacggcgctactgtaattacccttattgtaataacatacgcccaagatatataaatcgcccctcaacgggctatccgtcgaggatacatatttactcagcatattaatcgcctgatcctcatttcccagatgatagtaggcgttacccatgatacggtaaacctcgctattgttctcgctatccggataagaggctagcaattccttaccttcgctgatcactttctcgtatttattctggataaaataaatttgcgtgatatagtacaaggatcgctctttataatcaggcaagtccttcaagcgggtaaattccaccaaggcattgttgtatttaccggttgcgtaatcgatataagcgacataataggtagacgcttcccggtacttcgttccaatctgctcgatccgtgcgaaataaccacgggccttctccatatccccgatttgcaacaaggaataagccagacggaaacaataagcctcctgttgttccggacttagcatatcaatgttcgattcgttaaaccaaaagatagctttctgatactctccctgtccgaaatgggcggaaccgatcaagaagttcacctcgtccgcatgacgggaagccgggtacacatccagataatctttcaataactcaacggcattgggacggccttgctcataagcggagtagaccaacatataatcggcttcttgaatcaagtcggcatccgtggaatgctgtttatacgcctccagcttatcgatgcaacctgaataattcttcaaactaaacaactccttgccttcgacaaacaaacggttcggcgcatcaaattgatacgatctctgcccgcttgccatgtggctgcctactaccagacacagcggaataagtattcttttcatcactcatttgctttttaatacaagcacttacttcagtgcctattcgttctaattcgcaaatataagtaatatgcgccaaacagaaggcaagttctattaatatttaggacaacacgttctaaaattatctctatggaagatgatacaccttatagggagaagatgtattatcttacaacgacaagatgtatcatgttgcaacgataagatatatcatctttcattttcgtacaattttcctaattgttattttctaagataggctggtaccgcctttcggatagagtctaaaccgaagtcttccggattcacattctccgggcgaaggatcacgatctcggcggcatcatcttccgcatgcacgttattgaaatcatctaccaagcactcataaaacatatccagcgtatgcacctcaaagccggaatacatatataaattaggcaaggaaaacaaataacggcaattctggatatgcaaccccgtctcctcccttacttcccggcgagcggcctcctcccccgactcaaacatatcgacgaagccaccgggcaaatccaatgtacctttagccggctcttttcctcggcgaaccagcaataactcccccttagcgttctttatgaaacaagcgacagccgacgacgggttgaaataataaacaaaaccgcacgccatacattttttcgctttctcgttatgttccacgaaagcttttgccccgcaaaccgggcaaaactgaaattgatacaacggatgtctcatactttatgatttataattcaattaaaaacaacaagccgcacctaaatatagatgcggcttgccttatttcgcaaatgtcttttcgttatacgtaaaaccggatttagacttccaaaccagcgctttggtctcttacttcccaacccaaagcacttgctcctaatacggcagcgtcgctctctttcaattgagagaataataatttagtcttacctgcgtaaaccttcaacatatttttctccattgaacgtttaatcgggttcatgatcaaatcgccagctttcgtaagaccgccaaacaaaatgatagcctccgggctagagaatgctacgaaatcagcgaaagcctctcccaacatagagccggtagcctcgaaaatctcaagagcgatcttatcattcttcatagctgcgtcgtatacgtcttttgaagtgatttcatccggatccaagtcgcgaagaacactctcgtccttacggatttccagatattcacgagccgtacgagccacaccggtagctgaagcataagcctccagacatccttgacgaccgcaaccacactgacgaccgttgttacgacgcatgataacatggcccaactcaccggcaaaaccgtcatgtccgtataccaagttaccacctactacgataccgctacccacgccggtacccaaagtgatcacgataaaatctttcataccgcgagcggctccataagtcatctcaccgatagcggcagcgttggcgtcgtttgttaaagcaacaggaataccatcaatctgttcgctgatcaattgagccaaaggaatcttacctttccaaggcaagttcggagcgaattcgatacatccgttgaaaaagtttccgttcggagcacctacacccacacctttaatcttatccggaccaccagcctgatcaataacagacttcagacctttagcaagttccgctacatagtcattaacgtctgcatatttaccagtcttaattgatccactatacaagattgttcctcttgcgtcaactacaccaaaaacagtgttggtaccacctatatcgatacctactacataaggcttctccatgattttatatttaggattaataatgattttcctctttctaggtagcaaatataagaggtttaacacaagttgcaatacgatttgaagaaaattttacagattcctgtcattttatcttcttttttcgaaaacttatgttaagcaacattgttatataataatggagaattatcgcaacggtaatatctcgatccaatagtcatccggatcattaataaaatacaatcccatcttggtattctcgaagcaaaccgctcccatttccttgtggtatttacgtacttcctcataatcgccggctacccggaaacaaagatggctctcattgtcgcctagctcataaggttctttccggtcacgcagccaagtcagctccatcaagaaaccggtttgctcatccgttagataaaccaagataaacgaaccgtcttccgctaccttacgatggtactctttcaatcccaacgctttattataaaaagcgatactcttatccaaatccaatacattaatattgaaatggtcaaatctacctttaacttccatacctaataaatttatgcgtttaaaataacctatacattaataatatattatatatccgtcccttctcccggaacagacaatacgatataacgacatcctttcgattcggcgtaagggccgaaagccataacctccgccggacgttcccaaaagtgcatcgggacaaatacgcttgtttttatacgatcgataaattgctgggcgcccctcatgaaatcggtacccaaacgaggatcgaccgggaacatgacgagatccatcacagaggtttctttcgctattatatccagttccttcaagtaattaccctcagcctcggctacctcttgtggggtggactcgtctttccaatgccaattattcaagtcgccggcatggaagatccgtctgccttctgtctctatcaggaaagagatccccacatccgtggaaccaaatgccttgatggtcagaagttcatcttgataggcatcccccttcttcaaataaatagcatcatcagccttggccctccgacgcttcaatatatccttggaaaagatatatttgatatccggcttctgctctttccatttcaatacttccggattaaaatgatccggatggaaatgcgacgctaatatatataatgtgcccgcacgcttcaagagttcgctacgcacgtatcccttggccgggtccggatcgctatccttgaaataatcgatcaagatcgaaaagccatccgcttccaaagcgaatccgctatgataaatatacaccaatctcataatgatcctcatttattgtttatcttaagaacaccgaacctcaccgggttgttgaattcacggtacaaatatacaaaaggccggacatatcacatgcccggcccacaatgattatcaacctacaatttatttccagttctcattctggactaatacgccttccatggtgacaatttcatcgttagggatcggaagtgtcactaatctatccggatacgtagccgattggtacttcagcaaatatctcttttcataagccaagaagcccgaacctttattacccagctcctcagaagccgcattccagcgcacaagatcataccaatgatgcccctccatcgccaactcgatcctacgctcgaaacgcaaggcttttatcgccttatccactgtccagccactcgcgggatacaagccgatgcgataattagccgccgtattagcaatggtatttccgctcaccttatcctccaatacatatggagaagaagttaaagccatattgttattcgcgtcggcagccatgatacaactttgtgcggcacgtgcgcgaactttgttgatatattctctggcagtattgatatcacccgtttctatacaagcctcagcataaagcaggtaaagctcagctacacgcatcaagtggaagttcttggcagttgagccaccggttgtagtcaagctcaagcctcccttatccgcctttttcggcaggttcttcttattcaagaacggaccgccattcgccaaatcacgaatccagccatcgatagtaaccggtatatcccaatccatataggggacattgaaacgacccgcagatacgtcaacccgaggatccgtataaaccgtcaaatccgtatgaggtacattatcgccatcaattgtcgtaaccgaggttttgctttgatacgacttatcgagataaggcaatccattctcatccaccatatgcgcattcaccaagtcataagaaggctggtagaatccccagccggaaccaatcttgccagacaatgagatatgagagttaccattgatcgcgttggtataatactgcgtaccggagattgccatctggacgtcaaacacagactcgcccgtccagtcgctctcgcccgccgtgtaaagcgtctcataactcggggtcaaggtatatttcgtgcccttgctatccgtaccattagcgataaccgtttctaaaatcgatttagcctccgtccatttgttggaggttccattcgttccattatagggagaagactggaatattctcagtttcgccaaaaacgctccagccgcccatttgttggcacgaccgggctcttccggccatgcgccgggaagattatcataagcatactgcaaatcttcagccacctgttcccaaatataaatatagttaccgctctcatccacattcgatatcagtgggttcacggacgactcataatcctccaaagatacataaggaatagccgccccaaaattcttgataccctcaaacaaataaaaaccacgcatgaaacgagcttgggctatggcctcggtataaaaatctttctcctgtcccggtatagcggaaagctcatctttaatcaaaccggccaaatgcatgacattattagcacgagccaccgcatcgtatactgccacccatttacgcttgatataggaattatcggtcgtaaagctaaaagtctccaacaacgtgaagtccgattggtccgcagccgttgaccccttattagcgtcaccgcccatcacatcaccatacgtatagttcgtcaagcttgccccaaaataagagttcgtcgtagccgccggaatatttaacgctgaatacatgccggtaagaagataattaataccttcctgatccgttaaattggtttcattaaccgcacctacaggttcgatttccaagaaatcggaacaagatgtgctgcctaacgcgagaaccaccgccatcgcaaaatatataagaacttttttcataatgaattcaaattaatcgtttataaagcacatacgttagaatgtcacattcacacccatcaagaactgacgaggcataccataagatccataatcgatacctttattcatatcgcttgatacatattcgttctcgaacgaagtatgcgaacgaacctccggatccaatccatcataaccggttatcgtaaacacgttactgatctggccgtatacacgtatcttctcgaaaccgatcttcttcagcaacttcttaggcaatgaataccccaaagtcaacgtctgcatccgaagataagaaccatcttgcacataattggagttcgattcgttaccagcctcggggccctcggtcgaggtcgttgtccacaaaggataaataccgttcggattattcaccggatcccaagatttcgccaaacgatctttcgaataattagactgcaagtttccaaacatcgtatagtactcgtagtgtttgtacaaatcatttccaatcgagtaatacatgtaagtacttagatcaaaatctctccaagtcaaagagatattgaaacctccggtcaaatcaggatgaggattaccgataatcgtacggtcatccgcatcgatcttaccatcgttgttcacgtctttcatcttatatcggcctacccatgcggaagcgaccaaatcgttttccgtagccacaccataaggcagaacgcccgaggaaataacatcttgctcattttgataaataccatcaatctgatacccgtagaacattccgacaggttggcccaccgtagtaatattcaccttgctcaaacgagtatcgttgaacaaatcagaagatcccaaccgggtaacctcattcttgtatcttgagatgttagccgtgatgttataaccgaactcgccaactttgtccctccatccaatggacaaatcaatacctctgttcttcatatcaccgatattgatactaggctttgatgcgttaccaaccagcgcagaccagttagcaggcacaagcaagtctgaggtattctttacataaaagtcaaatccggcggtcaatcggttactcaaagccgtaaggtcgaaacctatattaaacatttttgtggtttcccatttagcgtccgagtcacccaagttcgagagcacataaccgggagaagtctctgaatccgatcccgtgataggatacatataataatttcccgtaccatactggaacgcatagttgtaagaaccaatattcgaattaccggtcgtaccataaccggcacgcagcttaaagtcatccaaccatttccgggtaggctccataaatttctcgtcagacatacgccatcccaaggaggcggaagggaagttaccccaacggttcttggaaccaaacttggaagaagcgtcgcggcgaatcgtgaatgtcgccaaatatttacccttataagaatagtccgcacgtccgaaaaggccgaacatagtcacttttctttgataacggctagagttacctatattagaagaagaaccattatccagcgtccaagtattcggatcgctctcgaagatgtaatcgatacgggttccttgcatataacggccgacaccttgtttgatagcctccgtacccaaaacaacggtaatattatgatcttcatgaatcttcttggtataagtagccgtatttgtccactgccagttcaaacgccagttgcccgtctcagtcaatgtattgttggcagaagcctctttgttcgccatattttgacgttcggtcatctccaaactccacataccattcaagcgagcgctaaactgagaacgaagcttcagaccttcgatccaaggattggaaagctcggcaaaaaccgcagtctgtccatgaaacatgcgtgtccaatcattctcattcatagctacctgatgcacggcggaaatatcacggcccgcattaggtgccacggatcccgtataatcacctcctacattatatataggtacccacgaattcatggtataagtcttagcgaacgtgttcgcgtctccttgacgaccagactctcctcccgtttccatagcggcaaggttcgtattttggcccatcgtgaaatacttattaggattataggtcgtattcgtacgtaaagagtaacgtttgaaataagaattctggatcgtaccctctcgatttgtataacccaaagagacagaataagtagctttctcgccaccacccaccaaagagatctggtgatcttggatctttccggtctgtacaatctcatcgtaccaattggtacccttacgagcctccgcatcggaataaccgtcggccaacatctgataatatgcggatcgggcccaagagctgcttccatcgtctacatacgacttttcccaagcctctacgctcccatacatatcaataatctgctgttcgctataaccggccggcttaatcgcataaggcatcgaaatacctttaccacccgtagcggcgatttgcccgaattgaggatgagaggttgccaaaccacgatagttatacagattctgctgtcctaattcctcgaattccatcgattcccaaccgttcaacaaatcataaccgctgttagccatcttagcgacaccaaaatatccattataagagacacgaacacgatcagcgcgcgtaccctgcttcgtcgtaatgataattacgccattcgcaccttgtgcaccataaatagcggtagctgaagcatccttcaacacttgcatagactcaatatcattcgggtttacggaactgatatccaccccggatacaccatccacaacaatcaacgggtctgaactattaagagaacccacaccacgaatacggatcgtagtctcaccgctgggacctccggaattagagatatacacaccggatgcttttccttgcaaagcctcggcgaaagtcgccaccggagtctcgtggatagcgtctgtagaaacaacagcaacagaaccggtaatgtccttcttcgattgcgtaccatatccaactactaccacttcatccaaagcttgagtatcttccaccaattgaatcctcacattcgtctgactactttttaaaggaatttcttgactgacatagccaatgtaagacacaactaaaatcgcattactaggcacaccttctaaaataacacgtccgtccatatcggagatatttccgttagtggttcctttaacaaggacatttgcccctacaattggtccggctttgtctgaaatagtacaaatgactctacgtccatcttgttgtaggctacgagttcctacgtttggtgttaaatcgccaacttccgcagcgatgatgggatatccgccgcaaaggaataaagaggctcccagaaacacctgtctccaaaatactacattactcataaaattagaatttaaggtataaatcaaaaaaacacaatctacttaacaatttgattttttcatatagacacaacatcacagcttgtagctattactcatctataatacttatggtctaaatgttttttcataaaacgactagttgaaacgatcgtttcatttagtcgtttgtaaagaaagtcttttttttgacacatgcaactttttgttcatttttttttatttttcttattgctaataagaaaaataaaaaaaaatgaacaaaaagttgcatgtgtcaaatcctctttccagatctttacaaacgacaagatttaaacgatcgtttcaactagtcgttttttttaatatcatgaaaaaaacaagaagtgattttcataattaaaaccatgataatgaagaagctacacaaaagaagttgaaaagaagagagtgatgtttacttattttaagatgtaaacagatgtaatataccttagaggtatgagagagtagtgaatttattttgttaaaagtttgtgttttttattttattataccttaaattctaaatttgtatgagaaatgttgtatcatggaagccattagtcttaggagcttcttttcttctgtacggagccggaacggcctttgcaacagaaacagatcatctgtatcctacacctagtacgggatttatgagtgtccagcaagatggacgacagattaactgccacatcgtggataaatctggtcctatcgttggagccaacgtagtcgtaaaaggaactactatcggaaatatttctgatatggatggacgagccattatagagaatgtgcccgcaaacgccatcttagtagtctcttatatcggatacgtaactcaagaggttactttgaagagtaatcagacaaacatcaagatcacgctggtcgaggattcacaagctttggatgaagtcgtcgttactggttatagtacacaagcgaagaaggatattaccggatctgtggctgttgtcgctacggatgagttaaaagagactcctgtttccaatttcgctgaggctttgcaaggaaaagctgctggtgtatttgtacaagcaggtggtggtccattaggggagacaacgattcgtatacgtggtgtgggttccgtaaacggctcagacccgttgatcattgtcgatggtgtacaaggagtagatatcgatgcggtaaatgcgaatgatattgaatccatgcagatcttgaaagacgctgctgcttccgctatttatggagcgaaaggtgcaaatggtgttatcgttatcacgactaaacaaggaaaaaagaacgaccgtgtacaagtatcttataacggttacttcggtgtagccaagatggccaatgacggttatggtctgttgaacgcttgggaagctatggaattccaagaagaagggcaacgtaatttattcaactaccgcggtggccaaacagtaaaccacgcccagttcggttcaataggtaaagacggtacaggtcatttaacaatgccttatgctatcaaacctgctggttatagtaaagaacagatcatctctcaatacggcagtatcgcagcttgggaagcttcttacaaagacaatggtgagaacacttggtctcgttccgcttactaccaaatgcttgaggacggctactctgaggaagaagctcgtgccggcacgaattggtacgacgaagtagttcaaaccggtaaggtgcaagatcaccagatttctatcaccggaggtggtgaaaaagcgacttattcagtaggcttaggctacatgaatcgtgaaggtacgatcaaggagtcatggttccgtcgttattccttgcgtgcgaatacaaacttcttcgtgaacaagtggttcaatatcggtcagaataccaacatcgccgtaatcgagaactcaggagaacgcggtcgtcaaggtgatgataataccttcggtaagaccttctccatccaaccttgggtacctatctacacagttggcggtgattattccggttcacaaaatgccgaaggaggacgtgctgagagcgcaccaatgtccgttgattatggcaaggacaatcgtcgtcgtttcttacgtgcccaatcagctatctacgcagagattatgcctttagaaagccttggagagaatttgaagatccgtactcagttcagcgcacgtttaggtggcgcatgggacttctggatgaacaaacgtacgatcatgaccaataaagaaggacgtaacaacaacgagttctacgagcaagcaaactattggttagattatcaatggacaaacaccgctacttatagcaaaacaatcaacgacgatcatacgatcaatgctgtgattggtacagaggcacttcgtgagggtttaggacgttggatccaggcaggtcgtatcaactatccattcgaagatgatcccaacacttgggtaatcaacaacggtgctagctctgacttaagaaatagcggaaaccagaacgctgtatccaccatgttcggtatgttcgctcgtgcggactatgcttaccaaggtaaatatttggctacagttacggtacgtcgcgacgcatcctctcgtttttctgaaaagaatcgctggggtacattcccttctatctctttaggttggcgtatgtcggacgagaaattcatggagaaatcacgtacttggttagacgatttgaagattcgtgccggttacggtacaaccggtaactccaatatcgattcatataactgggcattccaatatggtactggtaaccgttatctctatagcatcaatggttctgacacagaggtatatcaaggatttggcgtaaccaatcttggtgatatcgaggcaaaatgggaaacatctaagatgtttaatgcaggtttcgatattacagcttttaatcaacgattaaccgccaacttcgactactacatcaagaaaacttctgatatgttgatcgatgccaactggtctgctttggccggtgccgctgacaagccgaaagtaaacatcggtgatatgacgaacaaaggtgttgatttgaatattacttggaatgataaaatcggtgaggtaggttactctgtaggcgtaaacttgtcgcattacaagaatagactggatgagattggtactgatgccggaatctttaccggaactcgtatttccaacatgaacgtattgatgaagggacatgcaatcggtgaattccacggttatcagctagatggtatctataagagtgaagaagaagtccgtaactataagaatgatgccggtggaacagtattgccatatggtacatctgatgcttctacgttaaacgctgccaattatgtaggtcagttcaaagtaaaagatgtgaacaacgatggtaagatcgacgctagtgaccgtacattcattggaaacccacatccggatttaacaggaggtatcaacttaggtgttaactggaaaggattcgacttaagtacttatatgtacttctccgtaggcaatgatctattcgccatgtataaatattatacacattatggttccttacagtccgcttattctaaagatcgtcgcgacaattcatggcatcctgtaaccaaccctgatggtatctatcctatgtgggcaaccgctaatggtgagagtacaatcgccgcaaatgagtctaattccggctatatagaagatggttcattcttacgcatgcaaacgttgactttaggttatacacttccaaagagtattttagataaaatcaagtttgagaagatccgcatctatggtcaaatagcaaacgtattcacattgactggttactccggactagacccacaggttcgtacagatacagacggtcgttccaatgaccgtacgatgggtaccgatttcggttcttatggtatgccacgccaatttatcatgggtgtaaatgtgacattctaacaaatatttgctaactaaaaattgaaacaagatgaaaaatctatttatatatgcggcagtcattgccgccacgatgggaagcatgactgcttgctccgatttcttggatgtgaagccagtcacaaataaacaggaaccggattttgtatcgcaagaaggtattactcagttgctaactggtatgtacgctagattaaactctacagatgcgaatgatggatacttccgttcgacattgaccaactatgtatatggtgacgtaatgggaggtgacgcaaacaaaggttcaactttccaagaccaaccagactttaccagcttggaaacttatacatttacaactgacaacgcttattttgaaacaaaatgggcacatagttaccatggggtattcaccgcaaacaacgtaatcaaggtagcggatttagcaaaagaagagctttcggctatagcaggccaaagtaaagacttctatacggaaacaatcgcccaagcccgcttcatacgcggtttcttccatttcgaggtcgtaaaattatttggagcggctgttccttatgtagatgacatagccatgaaagagaacgtgaacccacaagtctctaatgtggatgagaatgggaattatatctatatctgggataagatagtagaagacttgcagtttgcctatgacaatctgcccgacacttggaccgaggcaggacgcgtaaacaaatgggcagctggcgctatgttggctaaagtaaagatgtaccaatcctctccatataacggaaaaaatggaacgtctaatcattggactgaagttaaaacgattttggaagatgtaatcgcaaacggaaaagataacaaaggcactaagttccgcttggcagatacatacgaggaactctatacagcaggggaaagtgactggacaggagaatctgtattcgatgtccaagctgcagtttccggcaccgtagaacaaactgccaatatcaacggagcttggcacatcggcttcagcggagcgttaggaactggaggttggggattctatcaaccctcttatgatatggtcaacgctcatattgttgacgcaaacggattacctaaaatggatgattcttatcgtaatgatcctgcgttatcaactttagacgagaacaatttacctcacactgatttgaccgtctatacagaccctcgtttggatgtttctaccggtcgtttcgagactccattcttagattggacagtgccaaatgcgttggatggttgggtacgtgatgtttctaacggaggtttatacctaaacaagaagaatatccctagaaaagccgataaaggaagcttatctaacacgacgcaaacaaactccactgctaaaaacttccacttgatccgttacgcagacgtattgctttggtacgctgaaaccttgatcgagttaggacagcctcaacaagcaggtgaatacattaatcaagtacgtgctcgtgccgccaatagctatgtaaaggcagtagatccggcaacaatgaccgaggctagttctacttatgttttggatgacaagattaacgggaagcaaagtacagatgctgccgcaaactatcgtataggtttatatccaccttctcaattcgcatcaaaagacaaagcgctggaggcactgcgttgggaacgtcgtatcgagttagcgatggaaggtcatcgctggtatgacttagctcgctggggtatcgcatccgaggtattaaatgatttcgtgaaatacgaagctaagcatttaggtaaatattccaatagtacatacaacgcaaaatgggcaacaatgcctatccctcataatgaaatcttaaagatggatggtcttttagttcagaatgaaaactggaaataaacaagtgggttaacagtcagaaagggcagccgggcatgtgatatgtccggcctgctttttaatccccaaaagtaagttaacttactttgctcacgaagttaacatactttgccaacgaagttaactccatgtgccaattaagttaacttcgttttgtgtagattggtatttccgataaaaatcgtatctttgtttgactttaaatcaaaatgaaacgtgtactctagccatgagatataaacaaatactcctcggtttgatcctgtttgtcctattagggggtttcttgcaaataaccggcaagtttcatttcttctatatcgagcagcttcaactattccagttttccgaagattatcttgcggataaaatcagcagtccgggaggtttatctttgattatcggggaattcttgacacaattctttattacgccttatgcagggcctttcattatcgcagctatacttacgtctatcggcttaacaatgagggagatcatcctgcaaattaatccaaataaagagctcttcctgctttacttactcccggttttattcttattattgattcaatacgacttcaattatttagtacaaggcactatcgcattcctattttgtttgattagcctgaacgcatggatgcgcataaaagatccctgttaccggctatccgccgcattggtaatcaccccactacttttttggataggaggaccgattgccgggctattctcattaagtgtggttctcaaggaagcgataagccgttccaaacaggggttctattttttagcggttttaattgaatacctgtttatcgggatcggaagtgtctggtcaactaccatcaccagttatcgcttcgcattcttaccggacgctttttaccacccgattctggcggctcccaatctcatctatttcgcatgggtctgtttaccgcttagcttgatcggggcattcgtatatcctaaaggcaaaaaccaatcaaagaaaaaaacagggatagagcttaccgttcaattcatcctaatcctattcctttgctgggtaacgattccacggtataacgaccagaaagcctatcctctaaaagtcttggattattatgcccgtaccgaacaatgggacgagatcatccggcattgtcacgggccgatcaaaaactatttatatttaacttacttaaatagggcacttgcggaaaaaggggagttggcagaccggatgttcgcttttgatcaacacggtcctcaagggttactcgcctcttggaacaagacctttacggtctccaccctgttaagcgacgcctattttacgctaggggaaatcgcattatcgcaggagatggcttttgaagggtatgtcaccgtaattggcgccggtaatccccggaacctgcaacggcttgttcaaacaaacttgatttacggaacgtatcctatcgccgagaaatatatcagtatcttagaaaaaacatatgcctatcatgattgggccaaacggcatagaggcttcttatataacgacaaagcgattgaagctgatccggtattagggcctaaacgaaaagctcttccgaaggaaagtaacttatccggtatcaacggactggaacatgatttacttatccgtgcggaacaagatccggaaaatcagctcccgatccaattcaccggggctatctatctgctgtctaaagacatgaaagctttccaaaggctgatagaaaagtattatggaacaccggtactcccctctctccccgtgagtttccaagaggctgttatcctattagcagagaaggatgtggattactggaagcgttttaacgtatccggaaatgtgatccgcaaattcgcaggttatcggaatttagtcgtgcagaaccggaacaacccacaacttccgcaacttataaagaagtcgttcggagacacttattggtcttattatactctaaaatgatcaacaaccatgaaaagaaatattctatatatcacctgtttatttcttattctactaggaatatcctgctcggatacgatcccggtaagcaaagaaacctcggagaaacctgtattatttcccgattatgcggatgtaacgatcccttataatatcgctcccttaaatttcaagatagaaaatccacatgcggaagccttcgccgtactcaaattcggagaagaaaagatacaagtcaaggaaaaagggggacaattctatcttcccgcatccgattggagaaaattgctgaaaagggcgacaggaaaagcgatacaagtaaagctctacgcaaaagacaaagaatggctcgcctatccggaattctcactattcgtcgctccggaacccatggattcatatctggcttatcgcttgatcgaacccggatacgaactttggaatcaaatgggtatttaccaacggaatctggaagattataagcaaagccctatcatggaaaacaaatacagcggtcaaaactgtatgaattgccattctttttgtatgcaaaaccccgataaaatgctgttccacatgagggataagtattcgggcacttatctgatcgacggagacaagatcgagaaattaaatacgaagaccgatcagacgatctcgcctttggtctatccctcttggcatccatcggggaaatacgtagccttctctgtcaatcagaccagccaaagctttcatgccaacgacaaaaaccgggtggaggtcttcgacagccaatccgacgtagttgtatacgatacggaaaagcatgagattatcagtacgccttccattcggacagcaaaagcgtttgagactttcccgacattctctcccgatggcaagactctttacttctgctcggcagaggcacgttccatgccgcatgaatattcagaagtaaaatataacctttgctccatagcgttcgatcccgtaacccggagtttcggctcccgtatagataccttatacaatgccggaaaagatgggaagagcgcctcttttccccgtgtttccccagacgggaaattcttgttatatacgctgtccggctacggtaacttctcgatctggcataaagacgcagatctatatctactggatatagcgagcggaatctctcattccttgcaaaacgccaatagcacggatacggagagctatcactcatggagtagcaacagccgctggatcgtcttcagcagtcgaaggatagacgggttatacacacgtccttattttgcttatatagatgaagaaggaaatgcgtctaagcccttccttttgcctcagaaagacacagactactatcaccgtttcatgaaatcttataatatacccgagtttattaccggaaaagtatcctccaagatccgggcgcttagcacgctagccaaagaggataaaggaattgacgtaacttatcgtaaatagaataaatcacatgagtactttatataagaagatattaccaccgcttccattcattctattgaccggcgtcttatggtttcatttgcagaccatgcaagagcctctctttttttatcgggaacagcagcagattttcctattcgattccacctatatattcagcatacttaagcagataggggggctagcgacttttatctctcaattcttgatacagtttttcaggatcccgcttatcggatcgctggtgaccgccttgatcggtggaatctccggttggttattctggctgaccttacgaaagatacatccggcattatatcttatgcccttggcctttctccccatcctattccaatatctttacctaatgaaagatagctatcattatgaaggactgatagccatgttgttttggtcattggcgcttaacgtatatagttacagcgcacgaagatttaattggacgtaccgtaccttaattggttgcttgctggcgaccggattgttttacacgatgggatctgtagctatattattcgcccttagcatcttactatttgatgtattacaaaaatgcgaacgctggtacgcaagcttcatcccgttgctgctgctacttatcgtaggctccctatgtgtcctaggaggcagtaaacccgattatgactatgtattttggatgaaagattacgtagagtatttcattgagctggaaccattctacggcttctcttggcaagtagcgctactcgttatgcttctattcttcctatcacgttacttagatcacataaaaacctatttaaaagctttagtagccgtagcattacttgccttatccggtatgtattatacgcaaacggctcttcaacagaggaataaagatttctatacgttgatgcaaatgtttcattacatagataccgagcaatgggacgccataatctcgtccgccgatctaaactataataactacttacacctgaattgcttaaaccttgccttatcccacaagggtgtcatgcagactgatttattcaaatatccgcaaagcggaatacaatctttggtctcaaagtaccaagcgcatatagaggaaagtttcctattcagccagatatactaccatgtaggaatcacgtccttggcatacaatttcgcttttggtacctcggtaggaattacatacggcagtcccgtcatgactaaattattaataaaatcccatttgatatacggacagtatcccgcagccgagaagtttatatcattattggaaaagacatgggcctatcacgaatgggcctcctcgcaacgaaagttcttatataatgaccaagcggtggagagcgacccggaattaggtacaaaaagaaaaagcctatccagcgacaaagaccttttcgccaatataatcggattgtttgataacctgatgattatattggaagagaatccccagaataaagccgcattggattatacgatcggtacgttattattatcgaaagacctgcccgctataaaaacgtttgttgaaagattcagtgggacggaagtactccctatattacccgaacccttgcaacaagccgtgatctcttatgcggagcatgatccggaatattgccgcaagtatggggtaaccgataaagtcctgtccgagttctcgatattcaagcaacgtgtattgggactaaggcatgcccgacaaaatgtagcgactggaatagccgactatcaacctactttctggtactatttgatactctctaaataaaacacatatggaaagacagacttatacaaatacaaaccgatatcttttcctttttctcatcgccttgatggtttcatgctccaaaaacgacatacagatcgccaagagcttaaacaaggaaataaccatttatccggattacaaggatgtgaccatccctgtgaacatcgccccgctcaatttctctatcgccgatagcagtgagcactgccttatcattaaaggggaaaagactcaactccaagtctatagtgatgaggggctctttgagatcccacaaaagagatggaaagccttattgaaagagaatgccggaaaccaaatagaattgaccattgctaaacgcatacagggcgaatggaacgcctatacgccttttcatatggacatcgcaaatgattccattgataaatatatagcctatcggttattagccttgagcaatgatatgtggaacaggatgggtatctatcaacgaaacttggagaattatgaccaaagcgtgatttatgagaatagcctaaccgactataactgcgtaaactgccatacgttttcctccgggaacccggataaaatgattttccatatgcgaggcaaacacgctggttccgtactgattgatggaaagaaaatcaccaagctaaataccaagactcccgagaccgtctcaaactttgtctacatgtattggcatccgaatggtaactatctggcggccaccgtatgcgatacctaccaaaacttcttcatcaataatcccaatacgctggaagtattggatcataactccgatatcgtgatctatgacgtgaagaagaacgaggtattctcttgcgaagcgttaaattccaaagacgcatggcaaatattccctgcgttctctcccgacgggaagagcctctatttcagttcgaccgccgccgtagattctatttctaagaatttcagacaaatgacctacaacctatgccgtgtcgactttgacccggaaacccgcaccctaggccagcaagtagatactttatacaatggccgggccaatcacaaaagcgtatccttccctagaatctcaccggatggtaaatatctggcttttaccctacaggaatatggcggtttcggggtttggcataaagacgctgaattatatatgatccgcctatccgacggaaagacgtacccgctgagcgaggcgaacagcgccgaaggagaaagctaccattcatggagccacaacaatcgttggctggtatttagcagtcgcaggttggatggattatacacacgcccgttctttacctatatcgatgataaaggtacggcccataaaccattcctcctgccgcaaaaaaatcccgtaaaatattataaagacctgttgtggacttacaacctcccggagtttatacaagaaaaggcccaagtagatacgcatgccgtgatggaaaccatgagaaatacaaaaggaatccaagtaaaataagaacaatagctagggtgggcgaaaggagataaggatgtctgtttggttaaatctacccacccttagctattgatctgtttgctcactcttttatcttcaccgagaatagaaatagagcgtttcaaatcaacgcccatatttccatttgttgtattcataaaataagtacaaactttcggcaatcagatttcactctttagtgaaacaaacatatgtaatctgcgtttatagattatcaaatgtctctttaaaaacttgagacaaaaataaactattttgatagaaaaataggtctgtaaatattcacattttattcacaacacacaccaaaacgttcatttatcctaggaagcatcacaatttaacatttaactgctccatcatcactccggtcttctcccttgcctccgtcacatccaaaccacgagccagcaagacggccatacggcgatgtccatgaacttccggttttccaaagaaacgcatctgcgtatcgggttgttccaaaaccttatccagattccccaaagacaaccggtcactgtccccttccactacaacggcacgggaagctcccgctccatgaaacacgatattagggatcggcaagccaagcactgcacgggcgtgcaaagcgaattgagacaaatcctgtgtaatcatcgtcaccattccggtatcgtgcggacggggggaaacctcgctgaatatgacatcatctcctttaatgaataattccacgccgaaaataccacgtccgcctaaagcctcggtgatcttaccggcgatctcacgggctttcgctttagcggcaaggctcatggcttgcggttgccaagactcccggtaatcaccgtccacctgaacatgtcctacgggttccaagaaagacgttcctccgatatgccgaaccgtcagctgggtaatctcatagtcgaaatccacgaaaccttccacgatcaccttacccgctccagcacgtcctccttcttgggcgtactgccaagcacgatcgatatccttttcctcacgaaccacgctctgtccgtgtccgctcgagctcatgatcggcttcaccacgcaaggcataccgattaccttcaccgcttctttaaattcctcctcggtctcggcgaaacgatacggcgaggtaggcaagcccagctcctcggccgccaagcggcggattccctcacggttcatcgtcagccaagtggcacgggcggtaggaatcacatggtatccctcttcctccagttccatcaaggtacgggtagcgatcgcttccacctccggcacgatataatccggtttctctttctcgatgatctcccgcaaggcatcgccatccagcatggagaccacataggaacgatgcgccacctgcatggccggagcgtccggatacttatccaaggcgattacctccacgccataacgctgcaactctattacaaactctttccccaattcgcccgagccacaaagcacgactttagttgccgtagccgatttgggcgtaccaattgttaccataaatctttctgctatttgaatttcgccgcaaagttaagggtttatgcctgtatagcctaaagcttttccctttatctattagggcaaagataaggttagcttcatcgtccaacggctggtggacgatcatgcaccagttggtagatgatcatgcaccagccgttagaagatcatgcatcagttggtgcatgatgaatgtatctttatgaattgggtaagacagccgcttgtttggcctacaatatacagaggaaaggaacaaggatctacttataatcaagacctctttgttaatattacataattagtagtaccttgcgatacaaggtatcttagtaaaacatatatttgtaaccagatgataaaagtgttcaccaacagtgtaacttatttagcaaactgtacgtctaatatataaagtaactacataatatgatgattcaactgaaaggaataaacaaaacgtactttaacggagccccactgcacgttttgaaaggtatcgacctagatatagagaagggagagatggtatctatcatgggagcgtccggttccgggaagtcaaccctattgaatatcttggggatattggatacgtacgacacgggcacctatctattaaacggacagttgattcagaatctaagcgaaagccgtgccgccgagctgaggaaccgtatgatcggcttcatcttccaatcatttaacttaatctcgtttaagaacgcagtggagaacgtagctctcccactctattaccaaggcgtaagccggaagaagagaaacgccatggcactggaatatctcgacatggtgggattgaaggattgggcggatcatatgccgaacgagatgtccggcggacagaagcaacgtgtggccatcgcacgtgccttgatcgccaagccgcagattatattggccgacgagcctaccggggcattggatagtaccacgaccgtggaagtgatggaactcctccgtagcgtaaaccaagaaggtatgaccatggtgatcgttacccacgagccatccgtggcggaagctaccgaccggattatccgggtaaaagacggattgattgaatacaccgtaaacgaagaatcgcatgtttgattttgacaattttagggaaatatggagcacgataaagaaaaacaagctccgtaccttcttgaccggtttcgccgtatcatgggggatctttatgctgattaccctgctgggagcgggaaatgggttgagaaacggcatcatattcaacttccggaggttttccgccaataccgtggaggtttgggggcgctataccaccatgccttataaaggtaaccccacgaaccgcaggatcgagttcaaggaagcggatctcagcggcatcaagatggcattcccggaaatagaatactgctcggctaccatttcgcaaacagataccatctcgtatggggaagaatacatcgtgggcgacctgcggggcgtatccgaggattacaattccattatatatattaatgtagcgagccagaacgggcgcttcatcaataagatggatatgaacgctacacgcaaggtaatcatactaagcccccgtatggcggaagtgctattccgtaacgaggacccgctgggtaaatacgtgaaatgcggcaatatgatgtatcaagttgttggtatctatgatgatgacgacaagagtaacaacgcacccgcatatataccgtttaccgtagcgcaacaactttataataaaggcttcgggttcggctccatttactttacggtaaacggggtctccaccgaagaagagtgcaaggatttcgagaacaggttccggtcgtatatggcccgtaagcacatattcgacccgacagacaagaacgcaatcggtatgtggatgaccggcaatgagatccgtatgttcaatacgatgacagacggtatcttgctcttcatctggatcgtaggtatcggcaccttgatggctggtatcgtgggggttagcaacatcatgttgatcaccgtacgcgaacggacccgggagttcggcatccggaaggcgatcggggcgaaaccggcctcgatattgaagcttgtcatcgtagagtccatcatgatcaccgccatattcggttacatcgggatgctgatgggaatcgggttgacggagctaatcgactatggcatgacgatgagcgggatgaacaacgcttcatccggaggaaatcccggcgaggatcttaccttattccggcacccgaccgtcagcctagggatatcgctggccgctaccggggtgctggtcgtagccggggtgctggcgggctatttccccgctcgcaaagccgtgaatgtatccgctattgaagccatgagaacagaataaaccgaaaagatatgtttgacatagacagatggacagaaatatgggtaaccatcacccgcaacaagacacgtagcttgatgacttgcttcggcgtgttctggggaatccttatgctggtattgttgctgggtaccggatcgggattcaagaacgccatgttcaagagcgtcaacggattcgcgacgaattcgctattcttctacgccgatcgcaccagcgaaccctaccaaggattcaacaaggggcgaaactggaacatgaggaaccgggacatagacgccatcatacgagacgtacctagcgtacaggatatctcccccatcctttggggcagccgctcggaaaagaatatcgtttacgggataatgaccggaacgttcaacgtgaaaggtatatatccggcttacttcaatatcgatacgcaagacctatactatggccgtttattgaatgagatcgatatgcgggaaaagcgcaaggtttgcttgatcggcacgaagatcaatgaggtattattccacaacgaggacccttgcggcaaatatatccgggtgaacgggctttactaccaagtagtaggagtggtcaaccaaagggcatcgggcctgaatctgggcggccggggagaagaaaccgtcttcattccgttcaataccatgcagcagaccttgaaccaaggcgatatcctgcatttcctcgcactgagcgtgaaaccgggatatccgattgagacgacgatcgagcaggtcaagaatatcatgaagacgcaaaatcagatcgcaccgaccgatcctcaggcgataggcgtagtcaatatcgccgcacaattcaagacattcaatctactgtttacaggtatcgacatcttggtctggctggtcggcatgggtaccttgctatcgggtattattggtatcagcaatatcatgatggtaacggtaaaagagcgcacgagggagataggcgtacgaagggctttgggagccaagcctttcgacatcatctcgcaagtcatgagcgagagcttggtgctgactgccttggcgggcttactgggattaagcgccggagtcttcctcttggatttgttggataagatattgtccgccaatccaacgaacgatccgaccctgctgaatcccggcgtaaacatccaaacagcggtagccgccgcggtggtactactgataagcggttttatggccggactgattcccgcatggagagccatgcagatcaaagcgatagatgccatccgagatgaataataacgaatcgataattaaaataaaactatataatcatgaagaatcgcatcgtaaagaaaatcctacgtattatcttattaacgatcgtaggtgcggcggtaataggcacattctatttcttatggaagaaggcgcaaccggtaataaccgtttatgaggtcgtaacccccaaaagggatacggtagagaccaagacggtggccaccggaagcgtggaacctcgctacgaggtagagatcaagccgcagatatccggtatcatctccgagctaaggaaagaagcgggacagatggtacaggcaggggagattatcgccacgatcaaggtcataccggagatggtacagctaaatagcgccgaatctcgcgtaaacatagcggatatatctcttaaacaggtggaggaaacctataagagagatgaactgctgttcaagcaaggtgttatcgcccaagaggatttcgatctctcgaaggccaactacttaaaggcggtcgaggagaaagcgaacgcacaaagcgcactggaaattattcgtgacggtatcgccaagaactccaatgtagccagtaccacgcagatccgtagtaccatcaccggtatgatactggatatcccggtgaaagtaggtaactccgttatccaagcgaacaacttcaacgacggtacgacaatcgccacagtcgccaacatgaatgacatgatcttcaagggaaacgtagacgagaccgagatcgggcgcattcacgagggaatgcctatcaagcttacgatcggagccatggaaagccgttcgttcgaggccttgctagaatatgtatcacccaaaggtgttgagaaaaacggagccattcaatttgagatcaaggcagccgtgacgatccccgaagatgctttcatccgtgcgggatatagcgccaacgccgagatcgtgctaaaacgtgcggaagacgttcttacgatcccggaaagcacggtcgagttccaaggggattccgcattcgttcagttagttaaacaagagcaaccggagcaagtcttcgagaaacatccggtaaaggtaggtctgtccgacggtatcaagatcgaggttcaagaaggactggccgcgaccgataaagtccggggcgcagctattgacccgaataagaaataaaagaaagattgtatgatgagaagaaacttatatatactggcaatcgcttccctcctgtccggaaactatgttttcgctcaggatgcggtgaagcaatggagtctggaggagtgcatccaatatgccatcgagcataatatcgacttaaagcaaaaggagcaggaacaggaaagccgaaaggtagacttacataccagcaaatacagttggctcccggccctaaacggcagtcttggacagagcttccagttcggacgctccacgtctaaatccggggtgatcgtggaccagaacgccgccaattccacattggggatcaatctggacatgcctttatttgacgggttaaaaataccgaacgatatcgccgcccgcaaacttgatctaaaagcgtctatcgagaacttgaataaggcgagagaagacctatccatcaatatagcttcctactacctgcaagtactttataataaagagttactgaaaatagcgcaactacaagtggaactagacaaggagcaggtgaataaaacagaggccatggtgaacgccggaaaggtgccactttcccaactgtatgatatcaaggcccaattagcgaaagatgaggtcacgcttaccgagtcgcaaaacaatgtgaacctcgctttactggatctggcgcaaagtctggaactagagcgaagcgatcggagtttcgatatacagactcctgtaattgaagatgcggtggctgataatatgagtagcatcctacctccggaaaacatttacgatcatgcggttacgttcaagcctcagatcaaggaacaacagtatttgctagagagccaaaagaaaatgttgcgtgtcgcgcaagcgggctattaccccaagttaaatttcggggctagttacagcaatggatattatcattctacttccggaggtgaatttgccgatactcgttcctttagcgagcagtttaagcagaatgggcaaaagatcgtcggattctcattgagcattccacttttcaaccgcttccaagtacgcaatagcgttcgtaccgcaaggatcaacattatcaaccgggaattgctgatggaaaatacaaagaaaacgttatacaaggaaatccagcaagcgtactacaacgcaacggcttcccaagagaaatatacggcttccgacaaatccgtcacggcgagcaaggaagcgttcaattatgcccaagagcgttacaacgcaggtaaaagcactgtctttgaatttaatgaggctaaaacaaaatacgcgcaaagtctagcggaacaggcacaggccaaatatgattttatcttccgtacgaagattctagatttctataatggtaaccctatccgtttataaacgttaattaatacttcatttttttattatacacacaaagtttaagggaagatatcttttatggacatcttccctttcagcatccattaaggcatttagtctgcacagaactacagttaaaatacttatcaaaaaaatgtacacaccaagactcctgaaaatcacagccgcaaatatactaatttttattataaaaaagcaaactgttataaaacattctaaaactaatataatattgattgatattgtcaaattcaatttagttgtactggggatcttgttgcattatgatagctggcaggagtttttttggtcttagctatctatctgttaattatgctgttaaacatagttctgtgcaaactatggtctcttgaaaaaataatgtgtgtctaattaacaaacaaattcattctatgaagcacaaattaacgcttgtactactctcattctttctgggagtgcagtgtatggtcgcccagcaaatgaaggtgaccggtgtagtgattaatgaagatgatggggagcctgttataggtgcatccatcgtagtaaaaggaaccactattggaaccattaccgatttagatggtaaatttgagttagaaactcagaaagatgctaagctaattatttcttatgtaggtttacggactcaagaaactacagctcagcaaaacatgagaattgttctttcttcagattctcaagctatagatgaagttgttgtcgtagcttatggtaccgcaaagaaaagttcttttacaggttccgcatccacggtgggtgccgctttgatggacaaacgtccattgagtaacgccctctccgcattggaaggaaacacttccggagtacaaatgacttcctctatcggacaaccgggagaagctgccaaggtaacgatccgtggttttggttcagtaaacgcggataatgctcctttatatgtagtggatggtgccatcttcagtggtgatatctcttctatcagcccatctgatatcgaatcaatgacaattttaaaagatgccgcttctacatctttgtatggatctagcgcaggtaacggtgtggttttgatcacgactaagaaaggttctagcagcagtggcgcaggtgttaccttgagtatctcacaaggttggtctagcagagcttataacgattacgcaaaagtaggtgtatacgattattatcctttgcaatggcaaatgttgagaaacgcaaatatgtcactcggacaaagtgctaccgacgctgccgctaatgcttctaaagatattatcaacaaattaaaatataatcctttcgtaggaatcgccaatgacgcaatcgtgggcacagacggtttattgaatccatcagcctcggctttaaaatggggtgaggaccttgattgggaagatgccgcttaccgtaccggacatcgccaagaatataatgtaagctacaatacaaaaacagaaaagagcgacacatatgcttccataggctatctgaatgataagggatatatgattaagacagactttgagcgttacaacgcacgcttgaactataatatctatccggtgaaatggttcaagagtggattgaatttaggtttaagtcgtacaaactccaattattctacttctacttctagcaactccgctggttatggtaacttatctcgtttcattcgttctatggcaccgatctatccggtacataagcatgatattgagacaggggcttatttggataaagaaggaaacgtagttactgatccggctttatatacctacgattatgaaggagcccgtatctccagcaatggacgcgacggtatcgctgaggccctgtggaatgatcgcttgatgtctaccacaaactctagtgcccgtacttatgtaacgatcactccgatcgaaggattgaatttaacagtgaactacgcatttgacaataaggatgaacgccgtagagtatatgagaacccagaggtaggtgacggaaccgcaggaccgggacgtttgaacatccgaaatagaaacttcttgacacagacattcaaccagttgattaattacacaaagacttttggtaagcataacatcgaagctttgttaggccatgagaactatagctaccgtttacaatataactacggtatgaagactaatgagatcgtttccggaacgtatgagtacagtaacttcgtaagcataagctcaatggattcttatacacgcgaatataagaaagaaggatacttcgctcgtttgaactatgatttcgatgataaatattatgtaacagcctcgtatcgtcgtgacggttcctctcgctttagcaaggataaccgttggggtaacttctggtcattcggagcatcttggcgtatcagccaagaagatttcatggaaaacttgacttgggtggacaatttgaaactgagggcatcctacggtgaaaccggaaacgatgccatctattatacagatgatgacacacaacaggattactatccttatcaaaccttgtataatttgggtatcaacaacggtttggaagcaggtctctacttcccgactatggcaaacaataatttgaaatgggagacacaggtttctaccgatgtcgctttagaattcggattgttcggtcgcttgaatggtacggtcgagttcttccgtaaggcctccagagacttgttattcaatgttagccaaccgttatccagtggtgtcgaaaagatcgtacaaaacattggtaaagttcgtaaccaaggggtggaaatcgacttaaactaccaagtattaaaatcaaaagattggaaattatcagtcggcgcaaacgctacattcatcaataataaggtgactcgtctgcctgatgccaaccggaaagatggtatcatcaaagactctaagaaattgatggagggacattcaatctatgagttctggttacgtcaatggtggggtgttaatcctgataacggagatggattgtatatctttgatgccgaaaacaacaccgatgcgaatggtaatattaaagatgcggtaaaaaagacacttgtagagaaagatggtcaagtattgacaaactcttatagctatgcgaaatatgatttcagtggttctgccgttccgaaagtatatggtggtttcaatatcaatttgagctataaggcattcgacctttctaccgtattctcttattcattaggaggcaaggtgcttgactcgagttatagaggattgatggatgtaggtgagttcggttatgcgatgtcaccggatctacataacgcatggacaactccgggccagatcacagatgtacctcgtttggacaataactcaggtcatgcgactagcattggacaatcctattctacacgttggttgacaaacgcaaattacttgaacttgcgtactgtcactttggcttacaacttgcctaagtctatcctaaacgttatcaacatcaagagtgcacgcgtcaatgtcagcgcagagaacttattcatgttgaaagcccgtcaaggtctgaatccgcaagctaactatgccggagtatcttacaatgaatatatgccggctaagaactttacgatcggtttaaatgtatcgttctaaattcataatacatcaaacaaaggaaaagatatgaaaaatatacaattattcaaacacatcgcagcaggactgcttctaagtggctctctgatcggcacaagctgttccagcgattatatggatacaatcccaaccgagaacgtttcattcacgacagtatccacttcgctcgacaatctttatcttgcactgaacggtattcatcgtaagatggtatctcaagacttaggcaaccaaggtttgggaggtgagcccggtttcatcatcggtcgagaagcgttagctgatgatttgacatgggacacgcagacttggcatcaaggtttcttaaactggagttatccaacgaacgcaacaagttcgtacaactccggtgagtgggaaacttattataagttcattttgaatgcaaacaacatcttgaaagcgttgaatgataactttagcgatgagtcaaaactcacagatagcgaaaaagcgcttgcgaaccatatcaagggcgagtgtttggcaattcgtgcatggagtcatttcaatctagtacaatattatgcgaaaccatatcgtaacggacaggacaactctcaaccgggagttccttatcgtacgagtccggaaatcgagcctatggcacgtaatacggtagaagaggtgtacacaaagattcacggggacttagacgaagcattgaacttattggcagactatgagccaaatgataagaatcattatagcctagcatcggtttacggattgaaagcacgtgctcttctgactcaacagaaatacgcagacgcagctacggccgcagtgaattctatcaatgaagcagagaaagatggctgtaagatcatgtctcagtctgaattgatgaatggtttcgctaatatcacttccgctacgaaagaggcgatgtatgccgcaatgacacagaatgaccaaacggtttatttctactctttctatgcgtatatgtcttggaacttcaactccagctctatccgcacaggtatcaaatgtatcagccaaagtacttacgacttaatgtcgccaaccgatcttcgccgtcaatggtgggatccgacaggaaaggcagaagtacccgcaacttcttacaaccagcgtgtttatcagaaccgcaagttcacggcacgctctacagctgatgctgtaggtgattttgccttcatgcgtatcagcgaaatgtacttgactgcagccgaggctttcgctcgttccaatcaagacgcaaaagcaaaggaatatttgcaagccttgttgaaagaacgtgatccagagtacaaggatttgggtaacactggcgcaaaactagcggatgagatcatgacacatcgccgtatcgaactttggggcgaaggtttccgttggttcgacttgaaacgtctaggtttgccattggatagaaccgggtctaattttgacgctactttctgtggtttcttgcacaaggatccgaatgctgatggttggatcttcgagattccaaaaaaggaaacagatttcaacgacttgatcgaaaagaactattaacactctttttacgttaacttacattaatcacaatccccaaagtatactttaacaggttatctttggggatttcttatatcactatttatgaaaacaaatcatttattttcagctctgctctctttagcgcttatatgtcctggaatagcgcaagaaacacattatcaacgtcctccagccgtaatagaggaagtggccctagccaaattatccccgatcatccgaattagtgataacaatcagtgggcactccagttagagcgttccccgtaccggtctatcgccaagcttgcgcaaccggagcttaaattagcgggaatgcgtatcagtcccgaaacattcaatacgagccggcaagccgaatatacgggtgccagtttaatgaacatcgctactcaagaagaaatcaagattgaaggaattcctgacaacgcggtaatcacagaagcctcattctctccttcatccaataaggtagctctattcgtggaagaagcgaatggcgtatatctttataactgtaccccggaacagcccgtagctcagaaagtaagtacccgtaaaatcaatgcgacaagtggagcggagatcttatggattagcgacaatgagtttattacgcttatggttccagaaaacagggggaaggcaccggagaaacccacagtcccatccggtcccatcattcaagaaagtactggaaaggtgatgcccgctcgtacctatcaagacttgctgaaaaatccatacgacgagcaattattcgactattatttcacctcccaattggtacgtataaaagagggcattgtgtacgagatcggaaaaccagcaatctacggcagtacgctttcattatccccggataaatctttgctacttatcgcgacagttcatcgtccgtattcctatcaagtaccggtatataacttcccacaaaagttcgaggtcatagacttacaaggcaattccatttatacgttagcggataatccaaccgtcaatattccgatgggatatgacacgacctcgccttatccccgtcaattcggatggagatcggatcaaccggctaccgtttactgggcggaagcgcaagataaaggagatcctaagcaaaacaagaccgatttcatggatattatctaccaaataagctatccgttcaacagcgagaaacaggaagtcgcaaagacagagaaacgtttccgcaacatcctgtggaatgacgatgctttcgctttattgatcgagacttcccgggagactcgtaaaaacaggacatttacttttaagccttgctcttctgagtctccggttctattattcaatgtatccaccgacgataattacaacaatccgggaaatccacttacgattaaaaatgcgtatggtaaatatatcgtttataccaataaagcccacaatgagttattgatgcttgcccaaggagcctcacctaaaggggatatgccttaccttagccgttacaatttgaaaacaaaaaagaacacggaactttggcgctgcgaggacggatattatgagaccatcctaaaggtagcgaatccagaaaagcttcaattgatcacttcacgtcaatccattacagaaccagcgaatctctgttctcgtgacttgaaaaagaaaaaattcgctcaattgactcatttcgccaatccatatccggccatggcaaacgttagcaaacaaaagatcaagtataaacgtgcggatggtttggatctaacagcgaccgtatacctccctgccggatatgataaagcgaaggacggtccattacctgtcttaatgtgggcctatccgagagaatataaaagcaaggccgaggcttctcaggtacgaggttctcaatacatgtttacgaatatcaactatggttctcccgtctattgggttttacgtggattctgtataatggaaaatgtcgagatgccgatcgttagtaccagtgagggagcggagccgaacgatgatttcattgagcaattgacaatgaacgccgaggcggccgtaaaagttatttccgagatgggtgtaggtgatccgaatcgtgtagccgtaggaggacattcctatggagctttcatgacagcgaatctattaacacataccaagctgttcaaagccggcatcgcacgtagcggggcttacaaccgtacgcttaccccgttcggcttccaaacagagacccgtacttattgggaagtaccggaaatatataatgccatgtcgccattcatgtctgccgataaactacatggagctttattaatcatacatggtgagatggataacaactccggaacctttccgatccaatccgagcgcctgttcagtgccctaaaaggccacggggcgatcgcacgttatgtcgtattgccctatgagagtcatggctacgccgccaaagagaacatattacatctattgtatgaatgtgacctatggctggatcgttacgtcaagaacgcaaaaaagtaagtagtactgactttgtcaatgaagtatatatcctctgacaggaaaagtatatttcctctaaccagtgaagtatatcttctatgaggaagccagccggcagccaccaattgccctaaaacaacgatgcccatcgtaaggttataagaatgcccatcgtaaactccttacaatgggcattcttaactccttatgatgggcattcaaagaaagccctatctgagattcgtttattttagcaatgaacaaggacaaagatgatccttctcgatatccttgaaatagttataagtacctaccttaagatccgcgcaagccgcctcatcgcaaacaatgattcccttcggatgcaactgcaaggcggtaattgtccacatttggttcacggcaccctcaacggcttgttgcaacgcacgagccttgttatgaccatttaccatgatcaatacctccttagcgtcaagaaccgtacctacaccaaccgttacagaagtcttcggaactttattcacgtcattatcaaagaaacgggagttagcgataatcgtatctgtagttaacgtcttgatacgagtacgagaactcaaagatgaacccggctcattgaacgcaatatggccatcaggaccgataccacccaagaacaggtctacgccaccgaccgctttcatgcgagcctcataagacgcacactcagcctccaaatcctcggcgttaccattcaagatatttacgttctccggtttgatatcgatatgactgaagaaattattccacatgaaagaatgatagctttccggatgatctttcggaaggccgacatactcatccatattgaaagtgatcacgttctggaacgatacgacaccctgcttgttcaattcaatcaggttcttgtacatacccagcggagaagatccggtaggcaagcccagtacgaatggtttttcagcggttggattcgcggctttgatcttcgctgctacataattggcagcccattttgagagttgctcgtaattaggttcgataattaatctcataacgttacgctttttttaattgaaaattgaaaattggaaattgaaaattaaaggattcccaatctacgcatctcgcctttcttttgtttataaattagatctattgttaatagctttcgttttatctgttgtcggagcctttagacttttcaattctcaattctccattttcaatttcccagccatttccttgcccaaggctaaacactcctcgtatttagtagcgcttaaaccttgcttctgctcaaccggcgtaccgacagtctcccacttcatcttctcgccaaaagccgccaaacgtttcacggcggctccagcccatgtgaaagacccgaaataaccgaaaatacgatttttcacctcacgcaactcgatcttactcaacacagcttccacctctgggaacaattgattgctataagtcgggctacctacgataactcccttatatttgaacacatctttcaagatataagaagaagggcttttgctaacattatgcatcacaatattcttgatgccattatcagccaaagaagcggcgatcgcctcagccatctgctccgtgttaccatacatgctgccataaataataaccacgccttcctcaccttcgtagcggctcatacggtcatagatatcgatcgctttcgacgcatattcacgccaaacaggtccatgggtagagcaaatcgtctggatatccaagcccgaaagcttctgtaatgccctttgtactggacttccatattttccgacaatgttggagtaatagcgaatcatctcttcccaataatgctccacgttcatctccgtatcgatcacaccaccatccaatgtgccatacgtaccgaacgcatccgcggagaatacgattttatccgtaacgtcataagtaaccatcacttccggccaatgcaccatcggagccatataaaatacaagctcatgacgacccgtattcaaggtatcaccctctttcacctcaaacaagccttccttgatgccatgatatccttccagcattccgaaagtcttattgtttccgacaatctgtacgtccggatattgctgacgcaacaaacggatacttcccgcatgatccggctccatatgatttaccacgagataatccaaagaacgtccgtccaaggcatccgctacttttttcaagaaaatatcagagtaacaaacatcgaccgtatcgatcaatacggttttctcgtctacgatcaagtacgagttataggaaacgccgtatggcaacggccacatattctcgaagagggccttttgacggtcattaactcctacataataaactttatccgcaatttcttttaacttgtacatcttttttaattgataattgataattaaaaattgaaaataacaaagcgtgtgctctctaattttcaattctcaatttttaattttccatttcttagcgctctccagacaaaccagcaccctgccaaaacaaacgggatacttagccattgccccatattcaacatcattccagcctcgaaaggctcttggtcatttttcacgaattcgatgaagaaacgagacccgaatacgcatatcataaatacgccgaagataagtccttgctttttccatgcctctttcttgaaatatagccacatacagatagcgaacgtcaccagataacaagcggcctcatacaattgcgtcggatggctcggagctgtaaaaataggctccgcccccattctccatgcgtgtaaattatcgataaaacgaaatccccaaggcaaatcagtggaatgaccgtaaatctcatgattcatcaggtttcccagacgaatcatagcagctaccaatcctgtcggaaccaccaacttatcgaaagcccataacatacttttatggcttactcgcttcgagtagaaataaatggcgataattatacctaacgtaccaccatggctagccaatcctccctcccaaatcttgaaaatctcaatcgggttggctaaataatattccggagcataaaacaaacaatgccccaaacgggcaccaatcaccgtaccgagcatcgtataaatcaaaagggaatcgatccatgcgggcggcagtccctcttttttccacatccgctctacaatcatatagccaatagcgaaaccaatcgcaaaagccaatccataccaacgaatctcccgggaaccgatggtaaagatagcgggatcggcagtccatgtaataaaatcaagcataattatttcagttggcaattgacaattgacagtcgacaatcgcaagtcaggatttcccgaactgtcaattgccagctgtcaaccatcaacttatattaaacgagtcttctaattaagttctctctctcgccgtacagcatatcgattatcggcaattcgatcatcgtatatgcgcccggttgttgcttcaagctcgcacgagcgacagaaaccaagatttgagcggtcaaggcagggttattgatcttcatatcgaattcgatcaactggttctgagtcttgcccgatacacctttacgaaccaagttcacaccatgtcccatgtccaacaaattatcgacacattcaacctgcattacatgagtctcatcatgagcgaaataatcatccgccttgatagcggcagacacttgcttgaaatcgtatccgtcttctacctcgatataaaccatacgacggtgtacacctgttcccaaaggaatcgtcatacttaaagccgccttcacgccttcgatagccttcacggcaaccgtatgccccatactcattcccggaccgaagttcgtataagtaatacctttcggcaccatcgcttctaacaaagcacgtaccacagagtcgcttcccggatcccaaccggcagaaattacagctaccgtattatgagccttcgctacagcgtccaaagaacgacgtaaatccacgatacctccgtgtatatcgaaactatcgacagtattgatgcctaaagccagaatctctttcgcatgctcttccacgctacgtgtaggagtagccaaaaccgctacgtcaaccttatctaacttggtgatgctatcagtaaccgtgtatgccttcaactcgtccggaatatcattcggattacgacgaataatacctgctacctcaaaatccggggcagcttcaagggcctctaacacatatttcccgatgttgccataacctacgatggcggctctaattttcttcatactctagtttttacttttcaaccaaccgcaaagttagatataatttagagctttaacaataaggaatacagtttttatatcattttcagaatgatatagatcctcactctttcacgaatgaatccggataggtagtaagctgctctacaccggctttcgtacgaatccaagtcttgaaggtacgggctccctcgttcaattcgatcacacgtgctccatttggtatatggatgtattccgtcggaccacccgtaaaacgaccgtaagccaataatacgtcataccagcaaaccgcataatcatcgtcatgatcatgaccgacaaatatacccatcacgtccccgttctccttaatcgccgtaaataagccggaattcaaggccggagcgcatgccttttccctacgtatgccatagagttgggcattctcatcggaagccgcttgattaaactccggcaacgcaatatggaagaaagccaaagaaggaaccggctctcccccgttattccgggtaaactctgcgcttttcttacaataccaatcgatctggtcacgcttaatataatcgtatccttttacccccttgatagttgaataggtattcgaatcgatgcaatacaagacgaaagcatccttcttcccgtcggaggaacgtacggtcaaggcgtaattacccacgcctgagatttcgggaacctcatccgccgttaaactatacggtaggctttcggctactttcagcaactcctcttttgtcgccccctgctcattatcatgatttccgaaaacaatggagaatggtattttacggtcggagactgtcttcaatacattccgcatattttccaacgcaggcttgctatagataatatctcccgtaaaaatcaccaagtccggtttctcgtcatccaacacttggttcatacgctcaaaagcgatgtccgaacgagggtcttgccatttcacatgcaagtccgtaaactgtacaatcttaaacttcttatccggattaaacttcaaccccggtttttgggcaaatcccaaagaactcaagccggcggccaataacaaggccccggcaaacatccactttctcacactcatcaaatctcgtgttttttgtaattaataattatttattcctttccgaaacaagcgtcgaacgcatgtgcggaaggttggaaatccactctcttcaccaattcgcaagattcccgtgccccatgttcccgatccatagcgctatcttcccattccacggaaagcggaccttgatagccaattgaattcaaagcacggataatctcctcaaaattaatctttcctcgtcctaagctacggaaattccaatatcgacggggatcgccgaaagtaacatgaccgccgaatatacccacctgcttaggggtatcactccaatatacgtccttcatatgcacatggaagatacgctccggaaactgatagatgaaatccacatagtccaccccttgatatcctagatgactcggatcatagttaaaaccgaaagcaggatggttatttaccgcctccaatgctctgcgtgcggaaaaagtatcgaacgcgatctctgtaggatgtacctccaacgcaaaacgtacacccagtttctgaaactcatccaagatgggcgtaaagcgacgggcgaaatcatcataccccttttgtatcatcgcgtccgttaccggagggaaagaatacaaataatgccaaatagaactacccgtaaaacctacaaccgtatcgactcccagcatctttgccgcatgagcggtccggatcatctcctcggtagcccgttggtgaaccccttccggatcgccatctccccaaatataatccggcaagatcgccttatggcgctcatcgatattatcgcaaacagcctgtcctaccaaatgggtagagatcgcataaagccgtaagtcatatttctttaacagatccttgattccttgataataagccgtatccgtacgtcggacatccacatgatcgggaagtcccaattccacaccgtcgtatccgaattctttcgctttttgacaaactgtttccagtgataaatctccccactggagggtatacaatgttacaggacgtgccataatagtattatttttagtcgattatttttatccatttattctctgtcgatccggtagctacaatcgtctcgataaaccgcatgccacggacaccgtcttcggcggaagggaaatccaaggtctcaggagccggttcctcaccagccagaatcgattgcaaagccaaggcgaaattccaatacaaattagcgaatgcctctatatagccttccggatgcccgcccggtgtacgggaattatgagcggcgatacccgacatatatccattggaagtacggacgatctccgctggacgatccggccaacgcataaccatcgtattcggttcttcttgacgccattccaacccacctttctctccatacacacgaatattcaagccattctctacacctacggcgatctggctagcggtcagcacccctttcgcacctccctcataacggatcaatgccgccccatcgtcatccaaaagacgatccggcacgaaggtattcaattcaccgcataattccacggccttcagccctgttatatattccgccagattaaacgcatgcgtcccgatatcccccatgcaaccggccttgcccgaccgaccgggatccacccgccaagccgcctgcttattaacatcagcgcagtcattatatagccagccttgaggatattccacataaatacggcgtatcttacctaaatcccccctgcgtaccctttcccgagcctccttcaccatcgggtaagcggtataggtatgagtcagcataaacaattttccggtttccttcactttgtctcgtaattgcttcgcctcatccaaggtatatgtcatcggtttatccagtacgacatggaaaccatgttccaacgccatcatggccggaccgaaatgcacatgattcggggtaacgatagacacaaaatccatccgttcgccttcaggcagggcggcctctttctctatcatttcctgataagatgcgtaaatacgattatccggtaaaaataaagattgtccggtagccaatgaattctccgggcgagaactgaagcatccacagaccaactcgatctgtccgtctaaattagcggcgatacgatgaacggccccgataaacgagccttgtcctccaccgaccattcccattctgatttttcgtttcatggtattattccgttttattaaactaaggtaattacattgttgattcacaaagctatgaaaaataaccctgcgtacgccaatttaacagcttaatattttttaattcacaaaatatatcgttcctttgcgtcaaacatttaccaaaaatatcaactatgaagaaaaatgaattagtggctatcgcctgtctgctttgtttttgttgttgtaatggaacggaaaaggaagtacctaaccccgacctacaagaggaattatcccccatacagtttacgatcgatttacaaaaggaagtattacccttccccgtaaccaagagtattcccgagctgaatatccctgagcctattccccaaaatcccgatgccgaggaagatccttctacaccggatatcgatccggataatttatacaaccggatcgattatatcgtataccaaagcggaaaaccggacattctggtaaaacataagcaattcacgcctcaagatccggatttcacgatcatttatgattcactgccctccggcgactatcatatttgtttcctagcccactcagacaagaatatctccgtgtccggacaaaccgcactattcagtaaagtatcagatacgtttcatctttttctcacccaagaagtacaagcgggagaaagaatcattaaagatatcaccttacaaagaatcgtcggcaaaatagagttcatatccgccgatgccgtatctaaagccctaaaaagcttcacgataaatgtctccaattatcaaaacaagattgacttaaccaccgggaatggcatttctcaaaacacgccttatacacaaaccgacacttttaacgactctgatatcgggaaaacaaatttctcccattccttcttcacgtttatcccggctccggaattcatgctcaaagcacacctctcggccaaaaatcagataaatgaagtaacccgggaaagagaggttaatgacatcctgcctctcataaatcacattattcgttatactgggattctctacaccccgaaggaatcagacgataccttcacccttgatatattaaacggtggcaaatgggatagccccatcgacaaagatctaaaagattaatacaaaaccggtgtgccaaatttgacacaccggctacctttttcctaaccttcacacttattttgcgtcttctatcttgaagagagcgttaaatcccgtcaaactaaaggtctcacgaaccacattccgcataccgatcaaacgtaaagaccctttcttggcagtcgtcattttttgtaatattaaaaacaatcggaggcccgcactactcacatattccaaatcagaacaatcgacacatacttttactcccggattctcccataccggcaaaaccttttcctcgcattcgcgagccgtattcgtatccaatcttcctttgatcttaattacagtctcttcacctttttggtcaataactacttccatatctttatattttattcggttatttttttcttcatgataaagacattccgctcatctactctctgataagagacctcatccataatcttcttgatcaagaaaatacccaaccctccgattggacggtcttcggcagataaagtaatatcagggtcttttcttaaagtcggatcgaaagcaatcccatgatctatcaaagtcacgatcaattccccaccttccctgaccaacgaaatgtctacggcatcctcaacatctcccttatacgcataaaaaattatatttgagacagcttcttccatcaccagattcaggctcatcatgaaagcggtgcttaatcccaattcttctccagcttcctccaagaactgattcatcatggaaagctcatgaatatcgttcttaatgcgtaatgttttttgcatatatctgaaaattttgcgctaaagatataaaaaaaagaaatatcctttccttaaatttgtatctttaccttcgaatagtatttaaaggtatagagttatggctaaaagatatttaataaacatattcttattgatcgccgtcttatgcgggttcagtagttgcgaggaggatccgtattatgatccgtatgaggaaatcacctatgatttatgtaattatgtatggactgattggtttgtcgtagacggtttagattgtgagcagcaacttacatttaatccggatgggaaaggatgggatacaagaatttatcattacccaagcggacgcatagatcgagaggaaattccattctactgggactggaacaattactataccgatatactttatatggactatgaagacggccaaacaacactagagaacgtatggattagtggtcggacttttaaatgtctatataatggcgaatgggtaacgtttaaggcctatcaaataggtctctaaaggatatctttacgtacttccccggcaaaatcatacaatccatcaaaaagacagggatctttcctcaattgttcgaacagtcatacaagtagtctcgccgggaatcgaacccggatctaaagtttaggaaacttctattctatccgttgaactacaagaccaactcttttgagattgcaaaagtataatcttttcctcaaataggcaaccgttatcggatgtttttcccgcctatccggaagcttctcattatttccgaaaaaacatgtacgtgtttccggaaaaacatgtacgtctttttcaaaaaacacgtacgtgttttcaagagctaatataacatcaaatagatcaatcaaataagctttgcatcaccgataacgatttgatttccggaaaatccgggagatgtagacggtaatactcaagaatacgatgaataatacgggcccgctcttgccgggaaaaaccataaagcgacatattctcaaaactgatacgcagcaaacgggaaaagaaagcgctctccaccttatttaaataatgccgatgcatcgggatatgatccgtaaacaccccattcaacatatcgaaataatatcccaccctatgcgattccatattcgggaaaataccgagatggtggagaagacctaacaagaaaaccatatgaaaattagcgatacctttatccgcatactccaatagatgtatggactcgtataaataatcaaataaacggggatccggctccgtatctttcacgaccctaaaaagaacctccgagaggaaaagcgccaatacattcttaaccggatcacaacaaacatcattcagcggaaaacaaatgcgggtctccttaatccggtgcaagtcccgcttattcaagtgctccacctccatttccagaacggacaaaggtataaacaaagccttcgataccgtgcttttcttccctcggctacgactaaccagatacgaggcccggccaaacgcctccgtatacatatatataatagaatatttatcattgtaagggatcgtatgcaagacaatccccctcgttttacacaacataattcgtatctttgcgacgatgattaagaacaaagatactcaaattaacgttatacatataattaaagtatagaattatgttggacttaacgaccccttctttattattttccgccatatcattgatattgttggcctatacgaatcgcttcctttcatacgccagcgtagtgcgtgccttgaaagaaaagcatcagcaaacccatgaccccaaggatatcgcccagatagcgaacctgcggaaaaggctctatctgacccgttccatgcaaatattaggaatactcagtttgctgctctgcgtgatcgctatgttcttcatttatgtatcgtggctggttttcgccgcatggatatttggcatagccttattgctattagcggcgtcgttatgtgtatgtatctgggaaataaatatttccgttaaagccttggaaattcatctggaagatataagttctaaagagaagttaaaacagtgagtagtattaaattttccttcgaaatgttttgccagttcagagagatcgtctatctttgcactcgcaatcgggaaatcactttcttagaacgctataagtgagagctttgacattttggcccattcgtctatcggctaggacgcaagattttcattcttgaaagaggggttcgattcccctatgggctacaataaacaggattaaaaaacaataaagagaagatctagaaatggcaaatcataagtcatcaatcaagagaatcagacagacaaacgcaagacgtttgcgtaacagatattacgcaaagacagctagaaacgctatgaaagttttgcgcgctactgaagacaagaatgaggcacaagctttattccctaaggtatgctctatgttggataagcttgcaaaaaagaacgttatccacaagaacaaggccggtaatctgaaatctaagttggctaagcacgttaatgcgctagcataagcagaaggtaattacttttacaagtataaagccggactctcaataagcccggcttttttaaacctgatggcccattcgtctatcggctaggacgcaagattttcattcttgaaagaggggttcgattcccctatgggctaccaatcaaaaggagagagataagtttatggcttatctctctccttttttactacacccgtccttttttcgctattttcacatcccccacttcgctatctcgataaaaatcactacatttgttagattttttttgaggacatagataattacagattttaaagaaagataaactcatgagtgaagaaattaagaatacttctacagagtactccgcagatagtattcaagtacttgaagggttagaggcagtacgaaaaaggccatccatgtatattggcgataccagcgagaaaggtctccatcacttagtgtatgaggtcgtagataactccatagacgaagcgctagccggatattgtacatacatcgacgtggtaatcaatgaggacaactcgatcacggttaccgacgacggccgtggtatccccgtggatattcatgagaaagaaggtaaatcagccttggaggtagtactgacagtgctgcacgccggcggtaagttcgacaagggaacctataaagtatccggtggtttgcacggtgtgggtgtatcttgcgtaaacgccctctctacttatctgaaagcggaagttcgcaggaacggcaaagtacatatgcaggagttctcttgcggaaagccgttgcacgacgtacaggttatcgataatacggataaaacaggtactacgatctctttcaagccggacggttctatctttacggtcacggaatacaagtatgatatcttggctacccgtttgcgtgaattagcattcttgaacgcaggtattacgctacgtctgacagataagcgagttctgaaagaagacggttcattcaagtccgaggtattccattcggatgagggattgaaagagtttgtccgctatatcgaccgttctaaagagaaactgattccagacgtaatccatatcgttaccgagaagcagggtatccctgtcgaggtggcgttaacttataatacttcttacaacgagagcgtattctcttacgtaaatgatattaacacgatagaaggtggtacacacttagccggtttccgccggggtctgacccgtacgttgaaaaagtacgccgaggattctaaattattggagaaagccaaggtggagattcaaggggatgacttccgtgaaggtttgaccgccgttatctctatcaaggtagccgagcctcagtttgagggacagacaaagacgaagctgggtaatagcgaggttaccggtgccgtggatatggcgatcggcgaggcgttaggctattatttggaagaacatccgaaagaggcgaaaataatcgtcgacaaggtgatcttggccgctcaagcccgccatgccgctcgtaaggctcgcgaattggtacaacgcaaatctccgctgacaggaggtgggctccccggtaaattggcggactgttcctctaaagacgcagcgatctgcgaattgttccttgtcgagggagactccgcagggggtacggctaagcaaggacgcgaccgtaacttccaagcgatcctaccattgcgcggtaagatattgaacgtggagaaagcgatggatcataagatcttcgaaagcgaggaaatccagaacatctatcgcgcgatgggcgtaaccgtcggtacggaggatgacccgaaagcgttgaacatggagaagctgcgttaccacaaggtgattatcatgaccgatgccgatgtggacggtagccacatcgccacattgatcttgaccttcttcttccgccgtatgcgttccttgatcgagaacggatatgtgtatctggcgactcctcccctctatttgtgtaagaaaggtaaggttgaggaatattgctggaccgagcaacaacgtcagcagttcatcttaaaatatggaggaggcaacgagaactcgatccatacacaacgatacaaaggtttgggagaaatgaacgaccatcaattgtgggatacgaccatgaacccggaaaaccgtacgttaaagcaaatcacgatcgacaacgcagccgaggctgaccaaatcttcgccatgttgatgggtgaagacgtaggccctcgccgcgagtttatcgaggaaaacgctacatatgctaacatagatgcttaaaatcatgaaagtccgtcgtccgaatctagaggccctatacaaagaagttgataattatataccggctaaagaaagccttcaacctccccgaataggaatatccgctaaccggagagacggactttcctgtatagcggagacctacgtgcaagccgtgctggatgcggggggagccccggtacttatcccggtgatcacggatctgaaagcattgaccgtactggtttccgaactagacggattagttatgagcgggggtggagacatcaatccgctctatttgcatgaggagcctatcccgcaattgcaagacgtagatacgttacgtgacgaatacgatttgatcttgcttcgcttggccgctaaccgacaaattccgatcatgggtatttgccgggggcatcagatcatgaatgtagcgttcggaggaagtgtctatcaagacatccattcacaagccaatcatgctctattgaaacacagccagacattggctcgggaatatccgtcgcatacggtaacactcgaaccgggaatgaaccgcctacgtactattttcaatggagatgaacaaatccttgtcaactctttccaccatcaagcggtaaaagaggtcgcccccggatttagagcgacagcgaccgccccggatggaatcaatgaggctatggaacatacggagaaaacgatattcggtgtacaatggcatccggaggccatggctccgcaaggggatgaggccatgaaagccctattcgcttaccatatcgagaatgcccgccgtttcgcaaaagccaaagcgatccatcaacggatcgtgacgatcgattcccatacagataccccaatgatctttcccggtgaatttaatatcggggagaaagaaggagggaaagtgaatcttccttttatggaagaagggcgtatcgacgcgacctttatggtcgcctatatcccgcaaggtaaacgagatgaggcatccttacaggcagcgacagcgtatgcgatagaacggctgaatcaagtaaaacgccagcaaaccttacatccggaccggatggttatagcgactaccccccaagagatccggacgattaaggcgcaagggaaaaaagcgatctgcctcggcatcgagaacgggtacgctttagggaagctggtcgaaaacctacgaatgttcaaggagatgggagtttcttatatcaccttatgccataatggggataacgatatttgtgattccgctagaggaaaacaggaatggaaaggactaagtcctttcggtaaggaagtggtaaaagagatgaaccgattaggaatcatggttgatatctcgcatgcggcggaaagtaccttttatcaggtactggaagtgagcgagacgccaatcatagcctcccactcttccgcacgtgcgctttgcgatcatccccgcaatttaacggatgatcaactgaaagcgctggccgctcaagggggtgtcgcccaaatctgcctatacaaaggattcatcaataaggaagaggaaaaagcttctttaagcgacgctatccgccatatcaatcatatcgtggatttaatcggtatcgatcatgtaggaatcggctcggattttgacggagacggggaactgatcggttgctcggctaccaatgagttgattaacattaccgtccgacttttagaagaaggatatacagaagaagatatacggaaaatatggggtgggaacttgctaagggttatgaccgctatacaagattttccaaacaaatagcaaacgaaaacaactacatattatgaaaaatatcttatacacagcaatatgcgcctgtagtatcttatgtggagcacaggcacagacacccggatcggaagtccccaacttaaaaaagctatatgagttgacagactcttgcgatgtaaacgtgcgggcacgattctccccattgatcgggatttccgccagtatctcaagtggtgcttcccgggtaggggccacctatatccaatccatcgtaaaggcagggggaactccgattatcatcccggctgttactgacggtaaagtactcaggaatatcgtatcgaatttagacgggttagttcttataggaggagcggatgtaaaccctctatggtatgaggaggagcctcgggaaaagctggaggaagtcgatccggtacgcgatttgtatgagttgaaactaatcaagatggctaccgatcaaaatattcccgtcttaggcatatgccggggattgcaactgttgaatgtagcgtttggcggtacgctttaccaagacatcccctcacaacgtggcgatcattctgtcaagcataggcaagatttacccagttcgtatggctcacaccgtgtctttgttgacgcgaactcacagctagcctctattctagggaaagataccttagccgtaaactctcttcatcatcaagcgatcaaggagttggcgcctatcttcaaggctaccgcttatgcgcccgacagtattatcgaggctatcgacgcttatccgaatcgatccatcatgggagttcaatggcatccggaagcgttgacttacggaggcgacactacgatgttaaggatattccgccatctgataggaaaggccgagactttccaccaagccaaagagatgcacaagcatttcctttccgtagatacacataccgatactcctttctggttcaaacgtgccggattcagcatcgcggaccgggaacgtaaccgggtaaacatccctaagatgcaagaagggaaactagacggggtgttccttgcggccttcatcggacaaggtaaacgtgatgaggtctctttacaagaagccgtacaaaaagtaacaggcttgatcgaaggtattcgcaagcaagctgaattgaataaggatttatgtggcatcgccattacgaaccaagacttcatccgcttgaagaatgaagggaaaaaagcgttctttatcggtatagagaatggatacggcattggtaaggatctggcgaatatcgctaagttcaaggcgataggtgtcaattatatcacgctctgccactcctacgataacgatatttgcgactcatccacccataccaagaaagaatgggacggtttaagtccgtttggtgaagaggttgtgaaagagatgaatcgccaaggtatcatggtggatatgtctcatgcctctgagaagtcattttgggatgttatcaaattgtccaaggccccgatcatctgctcgcattcctcatccatggcgatgtgcaagcacgaccgtaacctgaccgacgaacaactaaaggcccttgcccaaaatggaggcgtagcgcaagtttgcttgctcgaccgctatatcaatgaggattataaaaacgcgagccttaccgacgcgatcgaacatatcgatcatatggtgaaagtcgccggtatcgatcatgtaggtatcggctctgattttgatggcggtggcggaattatcggttgcgaaagtgacaacgatttcatacagatcactgttaaattaatagagaaaggatatacagaggaagatatcgccaagatatggggtggaaacttgatgcgtgtattagacgaggttcaagcgactgcctccgtaaaaacattataaacaaaacagatttatgatcagattattttttgcgttattgagttttgctcttttatcatgtggagccaaaggaaccaaagagacaggtaatatgccggagatcaaaaaacaaccgatcgcctcagctgttcccgatttcaacgcagacagcgcttacgcctatgtagcgaaccaagtcgcttttggtccccgtgtacctaacacggcggctcataaagcatgcggggattacttagcatctgaattgaagcgctttggcgccaaagtctaccaacaggaagcgatactgaccgcctacgacggaacgaagctggaagcgagaaacatcataggctcgtttgatccggagaatagtaaacgtgttttactattcgcgcattgggacagccgtccctattcggaccacgatcccgatccttccaagcaccggaccccattggacggggcggacgatggcggtagcggcgtaggtgccttattggagatcgcccgccaaatcggacaaaaagccccgggtatcggcatcgatattattttcttcgatgcggaggattatggtacgccggagttcgtaaccgattatacaccggatagctggtgcctaggtacccagttctgggcaaaaaatccgcatgtccctaattatacggcggaatacggaatcttattggatatggtgggcggcaagaacgccacgtttttcaaggagcaacaatccttacgtgcggcagccccgatcgtcgagatggtatggagcgcggcccgcgatctgggatatggcaaatatttcattaacgccgcaggtggagccatcacagacgatcaccaatatgtgattagcggacgtaatatcccgagtatcgacatcattaactacgaccctgagtctaaaacaggtttcgccagttattggcatactcaaaaagataatatggagaatatagaccgtgagactctaaaagctgccggtcaaaccgtactggaagtaatatacaatcgataaaatactgataaaatgacaatcaatgaacttcaagacaatgtaatcgaagaattctcagtcttcgatgattggatggataaatatgcgttattaatagatctgggaaactcccttcccccgctcgatgagaaatataaaacggaaagcaacttgatcgagggttgccaaagccgggtttggttccaagcggattatgcagatggaaagattattttccaaggagaaagcgacgccgtgatcgtaaaaggtatcgtatcccttttgatcaatatcctatccggccataccccgcaggagatactggatgccgatctttactttatcgacaaggtaggattaaaagagcatttatcccctactcgttccaacgggttggtagcgatggtgaagcaaatgcgtctgtacgcaatggcttaccgggcaaaggaacaacaataaaaataggtgttttcacacgtatataggcacgagccgatacgtatatacgtgtaagcctacaccgatataggcatagcctcatacgtatatacgcataaggttatgcctatatacgtattaaaaacctagtgtaagctgctccggtaaaagcgtgaatgtcttgcgatgataaggcgtgattccgtgggtacgaatcgcttccctgtggaccttggtaggataacctttattgtccagccaatgataagcggggtattccaaggccaattcattcatataatcatcacgataggttttagccaatatagaggcggcggcgatactcaggtatttgccatcgccttttactacggtcgtatgcggaatatcgggataaggggtaaaacggtttccatcgatcaataaatgttccggccgtactttcagttgctcgatcgcacgatgcatagccaagaaagaagcctttaagatattaatcttatcgatctcttccggactgacgatgcctaccgcccaagcgatcgcctcacgttcgatgacaggacgaagcttataccgtttcttctcgcttaattgcttgctatcgtttaaatcctcattcttaaaatcttccggaagaatcacggcggcggcgaataccgcacccgccaagcagcctcttcccgcctcatcacacccggcctctatacgcccggtttccatatagggtaataacatatcccagtttattatttatcgtatatatagctttgtagagacggagcacgccccgtctctacaaggttgtacattatttttgctcattcacaatccaagggcgaagcacgaaccaagcgaatgccgtagcggcgatcaccccgcaagtattcgccaagaaatcaaaccaatccccaccccggtacgtcgtacaatattcttgcaatatctcaataatcccactcataacgatcgggcataaaactgccccgatccaagcatgccataataccgtctcatacttccggtgattccgcaagaactccagccatagcatacccgacatccccccatacatacagaaatgaaccaccttgtccacacccgggaataaagggatatcatccatcttcggcggcttaaagaacgacaagtaaataacgaccaatataatcgccagtgaaaacggatatttcttaatataatacatcatactcaaaacatcttccgaactcgttccacacctgcgatgaacgtatcgatctcctctttcgtattataaaaggagaaagacgcccgcaccgtaccctcgattcctaaggcatgcatcaaaggctgggcacaatgatgccctgtacgaaccgctattcccagacggtccagcaacatccccatatcgtaatgatggatattacccaccaaaaaagaaagcaccgctcctttatgatccgcttgtccaaaaatacgcatcccttcaatcgtatttaatccagcggtcgcatatcgtagaagctcatcctcataagtagctatattctctataccgatccggtctacataccgcaaagcttccgccaacgccgtactaccaatataatccggagttcccgcctcgaacttaaagggaagttcattaaaagttgtcttctcgaacgagaccgtagcgatcatctcgcctcctccctgatacggaggaagtttatccaaccactcctctttaccatacaagaccccgatacccgtcggtccgtaaatcttatgcccggagaaaacataaaactccgcatccaagtcctgcacatccaccttcatatgcggaacggcttgagccccgtctatcaacaccggcacgtcttgttcatgagcgatctcgatcatcgcctttaccggattcaccgtacccaagacattagacacatgagtcacggaaaccaaacgagtcttatccgagaataatttacgatactcatccagattcaactcccctttctcattcatcgggatcaccttcaacgtaatacctttccgggccgcttgtatctgccaaggaacgatattggaatgatgctccatcacggacacgatcacctcatcccctgccgacatacattcatccgtaaagctggaagcgatcaaattaatggattccgtagttccccgggtaaaaataatctcattcgagaaacgggcattcaagaaatgctgtaccgttttgcgagcctcctcatgcgcctctgtcgccgcttggctcaagaaatgtacgcctcggtggatattagcgtttacgttataatatccattctctatcttttctaccacttgacgaggtttctgggtagtagcaccattatcgaaatatatcagcggtttatcgtatatcttatgatccaagatcggaaagtcttttcggatcgcttgaacgtctaacatagtcttacttctttttgtcttaaaattacgagagccaaagatacaaaaaaaaggctttctcgctgaaagaaagccttttttatcattacctaacagatattacgcctacactttattctcttctcgcacgtttacttttctcttccaaagttaaagtacggagactctatgcgggcgttgtccatcaagactgccagttcttttaccttatcgggatatttctccgccagatttgtatcctcgtgtatatcattacttaaatcatacagttccaatatagtctcacccacgatcggttgccggattagtttccatttaccggagcgtaatgcttcccggccattcaactcgtgaaattcccaatataaataatcatgggcctgttgatctttctttgataacaaggttggtaagaaagagattccatccgtcttctcgggcaaaaccgtacctgtaagttctgccaatgtcggcatgacatcccagaatgcgcttatatgatccgattgggctccggccttgatcgtacccgggcaccatgccaccataggtatacggatgcctccttcatatacatcccgtttgatccccctaaaaggtccgtaactcttgaaaaaatcgggatcagctccaccctcatgatgcgggccgttatcgctggtaaaaatcacgatcgtattcttatccaaacctaactctttcaattcagccattacatcccccacgtatttatccaaccgggagaccatggcggcaaaggaggccaagggcttctccgaggtgttataaccgccatacactttatcaaacttaccaatataaggagtctcctcgaatgagttctcgtacatcttataaatagaatcatgcggaagattcaattccgcatgaggcagcgtataagtaagcatcgcaaagaatggttgctccttatgatcccggatgaacttcaatgcttgctcatgaatcaaatcttgtgaatatgtcttgcaagcattgttctcgttttcaggaaaaagaaccttctcctcattatgccataaatgatccggatagaaggaatgcgactgccgttggcaattatacccataaaactcatcgaagcccatcttattgggaatggagacagagcccggatttcccaacccccatttaccaaagataccggtcgtataaccggccgatttcattaatttacccaacgtataggtatcttcccgcatcggctgttggccttcgggcgtgatctcccggtttccccggacttgcgtatgtcccgtatgcaatccggtcatcaaggagcaacgggaaggggcactcaccgtacatccggcataatgctgcgtaaacaacattccctccttcgccatccggtctatattgggagtcttgataatctgttggccataacagccaacatctccatagcctaaatcatcggccaagatatacacaacattcataggacgctccggagttttttcgcaaccggacattccgataagcagcaatgtcccggatatacataaagtcaattgtgttttcatatacctttaaaataaatagaagtgttagaaaccaattacaatcttctgatcctgattcgtagacaaacggttcgtccgtaccttaacccttcccatacggtccgaggcatcgaagtaccagccttcttgtccggcattgaacacttcgggggagatagcagatagcggcttcccggctacggttacgtttgacgggctagattctgagcggacatccaataggtaagtacgctcttggtaacgtcctttataatctcctttcgctttcgcaatatccacggtgatcgtgcctttctcacctttcggggaggaaacagagattaaggtacgggcaaactcgcctttcttataatcacgggtgagaccgtcgtcttcatataaattgaaagaggtattcccgtagggatataagtccaaggtcaagacatccgcaggtttctcgccgacataattcatatccgggtacatcgggataatggcgccttgacggataaataccgggcaaatatccagtttagcctcatatttatccaaccacttgccaccctcgtatgtctttccggtccaatagtcgtaccattctccggcagggaagtaaatactatcgcgtacattcttacgggtatatacaggggcaaccatcatccactcgccactcataaattgatattgggtggtcgtatcacgggtaaccacgtcatctgggaattccagtaccatcgcacgagccatcggtacaccggtcgtatgcgcctcatggcaataggtataggcgtacgggttcagacgcatcttcagctttaggaatttacggttgatatccgtgtacggatgcccatatacccaaggctgacggtcggcatctgcccagccactcatggtcataaagatcggggtgaagaccttccattgcaagtcgcgggtataggttttcggggaaccgccgaagataccgtccacatcgctagtagcggcgttcatagcggaaaggccggcacccgtgatcgtcgggatatggtaacggatataatcccagttgctcacttggtcaccgctccataccgtagaataccgctgagttccggcccaaccgcaaacagcccatacgaagcctcgttcgttcgtattgctctcgatcccctcgaatgcggatttacagccgttcaaggcaaactcatagccttctccaacccaagccacatccaatttacacaggcgggtaccacatttaccaacctcgtaggcgatcttatccacaccattctctgtccacaagcccgtatggaagcctcgtttacctaattccgtcacaacagaatccaatttcacatagccgcaaccatagccatcgttcggcaagatccagccacggggcatatcatattccacatatttatcagcaacttggctgattacgtccggggtggattgaggccatccggtgcgctgttcccctttgttatagcagtcggcatctcccatcgtaagcatccacatcgccggcataaaaggttttccggtgatatccgtatagtcgttcaataggtctttcaaggaagggccgtagaagtagaatgcgtcaaagcgattctcgttatgcgtcaactgactggtgaagcccatcagcttaaagccatcatcatagttcttgtccaacatctccgtgccgttgaaggcataatgtcccggggcaaacgtattgcggaatacgccatatcctttcgtggacatatagaagggagccgggttagaggattgatcctcatcccaaccggtcacctcgatatccgcttccttcccagcgtatgagaaattaccttgttgcataccgcaaccgtagaaatcctcatcaccgctacggcgcatcgtttgggtcgtttttagtccgaaggcaagtggttcggcctcctcgtagatcacggcacggttattcttgtcatacatggcgaaacgaatagggttcttatagacacgtacgacacattgggaagtcgtgaacttataatagctgccgttgtcggccatggagactctcgggttctttaccccataatctacaacgatcgagtttgccgccggattggtatactccccatccggtgccaaccagatacggaagatatcatcccggtaaaacatcaacttaaccttagcgtacccggagacgaactcatattccgtgttgctgatcttattgaacttcgtcaacttacccaagttcatacgggcggcgaacaggttcgcttttaatacgttgtttgacgaacgctcatccttcgggtattggatagcgaactctattttataggagcccatctgggttaggtcggtagcagggaaagctacctcatattcctcttgtttagcgatcggatgcccggaggcggttaccgtggcggttagtttctgaccgttgtttaaagaggcggttaccgtgaaatcctcgtctacgggctgggagccaacgttcttcagcttcactttcaacacgtcttccttcgtgaacgtattcccggtttcttggtgtgaggtcactttctccaaggccaagtcatgcgcgaaaggctctgtcagctcaatatcatcgaccatccaataccaagagaagatatcccgccagaagaaacgcaagtagacggttttctgattcgcggctacctcgctgatgttgatctcctcgttcaccggggcatgaagctgggtagcggcggggatcttatccatcacattatactctttccaattcaccccgtcgttgctgacaccaacccaaaggccggcacgttttccggtgaaccaattattccaacgaaacaggtgctggaatttcaacaccacatcgttctttcccgcgcaatcgatagcgctggtctggaaatagccgttcgggtattcctcccgttgattccacttcgtgatctcctccccggtgactacgcccggccggaattgcatatgatagccacggcttgtagatgcgatgggaggtgcttgttgctcgaactggaaagagccgggataaggctgatcggttacaatccattcacactttgccgatttcgttgaatcgacaatcatccagccgtcgggtaatttcccggcggagaaatcttctttccaaaaactttgttgtgcggacagggaggaaacgcaacctgtcagaaacatggatacaattagactttttatcatttgaattagttgattagatttaggcagtaaagatagtcttaatttacgagggttcgcaaacgttcgcgtgatttttattcccttttcgccgggcgaaagcgtgttattatcaatggaatccttctatcttcgcgtatgtacaaccttgtcatataaatcaacctcaaatccgcaactacgcgcctaatatgatacagaagcgaaaagaatctgcatcgttagtaaaaagggggcacagtgcatcgaatgtcaccataaagacatataaatgccccttaccccaccatgcgacttgaggcaatacgcaaaatcacgactataagttgtcggtgttatccaaagtcattctggaacacattggcataagcattgttgcatgaatagatattcagcacatacttccttgatgtcctgacccatttggctggcacagagatgaacttaaagacaaacgtcttgatgcggcttgttgctttgagtccgaacctcttcacgtcaagcctcgccatgatgaatttatagaagttgcgtatgagtgccataagcagaagaaacaccgtgttttctcccataaaggattttggaagcctgttccagccgaatccgttattcatatcatcgaagatgcgttccttccctccacggaggttatagaattcgacaatctctttctcggaagactcgtagtcatttgtaaggatgcagcggtaggtgtattctccttcccacaggtcgagttcgccgtctatccgcttctgtctttgaatcacaagacggtatgccttccctttccatttctcgatgagaatggaggccagctcaaactcaatgccgcccaattccactttcttccaacctctgagggcaaagatgtcattgtagagcgaactgcatcggttagcacggatatagaaggtcttgcagtgtttagcaatctcttccactatctcttcagaacacgagccgcaatcagctctgaaacggttgataataagcttgttttgttcaaacctttcaaagaacctcttcagcgtgtccttctggtggaaacggacatttgtgttgccgtcgctgttctcaatgccgacaatcaagttgccaataaccgccacgccagggcgataaccaaggaacttcttgtatgtaggcttcgcatcaaacttctcagcctctatgaactggtggtcgaagtcaacgtcatacccctcgccctctttcagctgccctgtggacaataggcaattgaggagcagtgtattcagcttgtctgccgtgttgaagtcgtaggtcttgccagtgtcggatgtgtaggaaatgttatcctgggtcagttcctttatggctctaagaatcgtgtcggcactgcatgtgcgaagtgtcggatgaagcgaaaggtggtacatcagatgagtggtgacatcctcgatgcatgagccgccacaaaaataaacgctcataagcgaacggatgatttcgctgtattgataaccatacagcctgcatctcataccgagggttgagtcgattacagatgagagtctggagtcaaattgctccattattgaaaatattcctccaaaaggagtgagtttctcggatttaattgctacctttgccatgtctgtcgggtttgatacatattttgatttgcaacactaagataggtgaaaaatctgacatggcaaattcctgagcaactttttgttgctcaggtacttaaaaagttatatttgtaatagtgttgcggaattaaggatcaataaacatatatcatgaacagacatttattcttgagccttttactggcccttttcgcttccagtacgctttctgccgataaccttaaaatcgagccggccttctggtggagcggtatgaagaacccggaactccagctgatggtgtatggtaaggatatcgccggatatctccctagcgtgaaatatcccggcgtacagttgaaaagctcggtagcgttggaaagcccgaattacctattgatctatctggacgtggaaaacgccaagcccggcaggtttgatatcacgttcacgaaggacaaaaagagtttcaattactcgtatgagttgaaggcccgtaaaccgaacgccgatcggatcaaggggtttgactcttccgacgtgctttatctcatcatgccggatcgtttcgcaaacggagatccctcgaacgatcaaatcccgatgcgtacctcttataaggtagaccgtaacagcccgaacgcccgtcatgggggtgacttggccggtatcgagcagcatttggattatatcgaggatctgggcgttaccgctatctggctgaacccggtattggagaatgacatggagggaggctcttatcacggatatgccacgacggattattatcgggtagacccacgcttcggcacgaacgaggattacgtccgcttgatcgagaagacgcacgagcggggcatgcgtgtcgtaatggatatgatcttcaaccattgtggaagcgatcatccttggatgaaagatatccctagccacgactggtttaataatctcgataactacgtgcagaccaaccacgataaagaggcttatttcgatccttacgtgtcggattatgataaggagacgatgctgaacggttggtttgtcccgagcatgccggacttgaaccaaaagaacccacatgtagccaaataccttatccagaactctatctggtggatcgagtattgcggcgtggatggtatccgtcaagatacgtatccgtatgccgacgtggacatgatgcggaattggtgcacggaggtcatgaacgagtatccggagtataacatcgtaggcgaggcgtggatgaactacacgatcggttccgcttattggcagaaaggcagccggttgaacttcgggcaggataccgagctgaaatcggtaatggatttccgcttgatgggtatcgcgagcaaggcgttccatgaggagaccgggtattccggaggcttgcacacgatcttcgagcatatgtgctatgattatgtatatcccgatatctataacgtattgcgtttcttggagaaccatgatacggatcgttttcttccctccatgcctaagtctgtcgatgatttgtacgcgttcaagcaaggggtgacattcttgttgacgatccccggtattccccagctctattacgggcaggagttgctgatgaacggcaccaaggagaagggagacggatatatccgtctggatgttcccggtggctggcccggcgacaaggtgaatcaattcgaggcatccggtcgcagcgaggtacaaaatgacgcgtggaatttcctccgcactttattgaaatggcgcaagggcaacgctgtcatcgctaagggcaagatgaagcatttcatggtgaaccaaggtgtctatgtttacgagcgcagtctggatggccggagcgtattgatcttgatgaatggcagcgacaaggaggtgaacctcccgttggcccgctatgcggaagtattgcgaggtaaaacctccggaaaagagatattaaccggaaaggagattccattgggagacgaattatccttggcaccgaaagggatcttcgtactggaaatgtgatgccattagccccgatgatttttcattcgaggacctattcatagattactaataattaaatcgggaggccttaaacctcccgattttcttttcatatatactattttaatcgcttttcaagaatcaattgatgcctgcattgaatgccgttctcccagataggctcggcatagttccgtacgaaataatcgcgatctacggcaaccaagtcgaagccttcctgttgataaagcatcatcgggccggcggctgaggttccggtgcaaatacgcaaaagctcgacatcttgagccggagcccatttattagatacatgccgtaatagtttccgggcgattcctcgccgacggaagatatccgccacggcaagattcataatctccgccttgcgaccctcctccttgcgaaccacgatcacgccggcaacggaatttcgtaccgtagcgataaagcaatccgaatcctttaggtaagcctcgactttctcccgatccggatcggcttccagcagtaactcataaggaggaaataaagctacttgtatctccggctccccgttagcgacgatctctactatatttccgtcaggatctcggatcacgccctcatagtaaccatccccggaaacgcgggtctcaccggcgatcgtgtatccatccatccggaaacgttcgatcatttgatccacttgctccttcttatccgcatgaaaggccagatgagccaagccgatatgatccttgtcgtaagcctcagtaatatcttgccgttgcatgatctccaaggcggggccactctcgaaagagacgaaataggaggcgaatccttttttcgaattcacatatttctcattactcttaccattaaaatactttacatagaaatcccgtaaacgttccagatgattcgtccataaggcgatgtgtgttaactgcataagttggaggttttaatttgtcactgccaaagatataaaaaaatcagacatggttccctacattatcgtcgggataatccatgcctgattatagttttcctcttattcgcaattatttacaaatccggcaaccggcgcatttggccagctcaccgcggaaacgtttctccaccagtttatgcaaacggtctttcaacgcctccaagcgtacatggtcgatcacgtcggaagtgaaagccacgctcaatagcatacgggcctcgtcacgcgggataccgcggctttgcatatagaacaaagcgttctcatctaactgaccggtcgtcataccgtgcgagcattttacgtcgtccgcataaatctccagttgcggcttgctgtacatacgggcctcacgagtagcgcacagattacggttcgtctggtaagcggcggtcttctgggcatcctctttcaccaagatacgtccgctgaagacacctacggcatgatcattcagtacattcttgaacaactcgttgctggtacaattcggaaccgcatgggtaatatggctataggtatccatctgttgctccttgtccagaacggacataccgcataaggtagactcggcatactcgccattcagttccacgtaataattgttgcgagtcaagccattcgtcaacgtaataccgtttaccaagacattggtcgaagccgcctgctttacgtgtacggaagagaaacgggtcgtagactcgctgctttcttccaaatcataataatcaaagcgagcaccttcctccgcgaaaatctcaaccacttgagtcgccaagaatttcacgtcatcgatactatgatcgcaaaccaatagcttcgcttccgaatgaggttccataatcaccagaacacgacggttcgccatcgtatccacatcattacggaatatattcaccaattggataggacgctcaactacgacatttttcggtacatacaccacgaaaccatcttgggctaacatcgtattcaacgcgataataccatccttgctactcggcgccgcctttccgtaatacttggaagcgatctccggatattgctccgtaaaagccttcaaccctccagcatacacgccttccggcaaatgcgctttcggtaagtccttatcgtaaaacgtatcgttcacgacaaagtataacgatgtgctcaggttcggcacgtcacaacggaacacgtcataaggattcaccgggatagcgacccggttgatattcaaaccgtaatccggagcgaacgcttgggctacatccgtatatttataatcctcgcttctcgtggaggggaatccgagtcgctcaaagttcgccaaggcatcagccctaagggcattcatcaccggcgtactatgacgacataccagatcctcacattgggcgaaaagatcgatatattgttgctcggccttcatattactcatctcccatctctttcttgatccagtcgtaacctttctcttccagttccaaggccaattccggaccggcggtcttcacgatacggcctttgtaaagcacatgcaccacatccggcttgatgtaatccagcagacgctgatagtgcgtgattacgatagcggcattctccggagtcctcaactggttcacgccatgcgctacgatacgcaaggcatcgatatccaaaccactatccgtctcatccaagatcgccaatttcggctctaacatcgccatctggaagatctcgttccgctttttctctccaccggagaaaccttcgttcacgctacggctggccaatttattatccagctcgacgatcgcacgcttctcacgcatcaatttcaagaagtccgtagccgaaaccggttccagaccgttatatttacggtgctcgttcaacgccgcacgcataaagttcaccatactgacccccgggatctcgaccggatattggaagctcaaaaaaataccctcacggctacgatcctccggagaaagatccagcagattcttaccgttgaagataacctctccttccgttacctcaaaagcgggattacctaccaatacactacttaacgtactttttccggaaccgttcggtcccatgatagcatgtacctcacccgctttcaccgacaggttgatacctttcaatatctctttgccatttatgttggcatgcaaattcttaacctctaacatcttttctaattgaaaattgaaagttgaaaattgaaaattattctatcctacgctgccttccagcgagatcgttagtaatttctgagcctcgacggcgaactccatcggtaacttattcattacctcacgggcatatccgttcacaatcaagccgacagcctcttctaccgagatacctcgttgctggcagtagaacaattgctcctcgctaatcttactcgttgtagcctcatgctccacgatcgccgtctcattctgaatatcagcgtaagggaacgtatgagctccacaagtagagcttagtaacaaactatcgcattggctatggtttcgggcgccttccgcacgggcggacaccttcaccaatccccgatagctattctggctatggccggcagagatacccttggatacgatcgtacttttcgtattcttacccagatgaatcatcttcgtacccgtatcggcctgttggtaattattggtcacggcaaccgagtaaaactcacctaccgagttatcacccgccaagatacagctcggatatttccaagtgatcgccgaaccggtctctacttgcgtccaagagatcttgctaccctcacctttgcacaaacctcgtttcgtcacgaagttatagatacctcctttaccttccttatcacccggataccagttctgtacggtagaatacttcacctcggcacgctcgttcgccacgatctccacgatagcggcatgcaattggttctcgtcacgcatcggtgccgtacatccttccaaataacttacatacgcctcatcgtctgcgacaatcaaggtacgctcgaactgtccggtattagcggcattgatacggaaatacgtactcaactccatcgggcaacgtacgcccttcggtatataaacaaacgaaccgtccgagaacacggccgaattcaaggcggcaaagaaattatcacgataaccaaccacgctccccaaatacttctgcaccaagtccggatgatgttgtacagcctcgctgaacgaacagaaaataatccccttctccgcgagattctccttgaaagtagtcttcacggaaacactatccatcacggcgtctaccgccattccgcttaaatgcttctgttcttccaaaggaatacccagtttatcgaatgttttcaacaactcaggatctacctcatccaagctctttggtccctcttttttcttaggggcggcataatagataatgtcctgataatcgatcggcgggatattcaagtgaggccatgtaggcatctccaacgtctgccaatggcgaaaagccttcaaacggaactcgagtaaccattccggctcgttcttcttggcagagataatacggaccgtctcctcgtctaatccacgatggatcacctccgtatcaatatcggtaacgaagccatatttataatctccgctcgttacctcattaatgatatgatttgaatcctgcataattataaattaaccattgataaaagcccttcattctcctaatgaaaacaaattatgtgggaaaattgttggtactatttgcttcacgctataataaaaacgagattctatcttcgattggcgatgaatcaagaccgatccgcgatccacgaactccagcgcattcaacagcaaactggtaaagaccaaaacgaccagcaacccgaaaaaacccccaaacaaatggttgataacgctcaacggtgtcgcccctaccaccttggtaaccagttcacccgctaggataaatacccccataatcaagataaaacccgctatataactcaagatcgtaaccccttcttccggaaaccaacccaacgccaagatatatcctttcagccaagccgccgctttcccgcagaaaaagatcgcgatcactagggctataagcgaaacaacctgtttgatgattccatcaaacaggcctttcacaaatcctatccctgccagacatagcaatgtaatgtccaaccagttcatcgttataacgtcttctttatttctgtctcttcgtaagcctcgatcatatcgcccacttggatatcgttgaagttcgtaatattcaaaccgcaatccaagccagccacgacctctttcgcatcgtccttgaaacgtttcaaagaacctagctcaccggcatagataacgataccgtcacgtatcaaacggatcttgttcgtacgtttgatcttgccttccttaaccatacatccggcaaccgtaccgaccttggtgatcttgaatacctgctgaacttccacataagcggtaatctcctccttgatctccggagaaagcatgccttccatagcgctcttcacctcctcgatcgcatcgtagatgatagaatacaaacggatctccacaccttccttctcggcgtttctacgtgcttgcaaagacggacgaacttggaatccgataatgatagcgttcgaagccgctgccaaaaccacatccgactcggaaatctggccaaccgccttgtgaattacgtttacctgaatctcctcggtagacaaacggatcaaggagtcggacaaagcctctacggaaccatccacatcacccttcacgatcacgttcaactcttggaagttacccacggcgatacgacgtccgatatcatccaaagtaagcatcttctgcgtacgaagacctaactcacgctgcaattgctcacgacggttagcgatctcacgcgcctcttgctcagtctccaatacattaaatgtatcaccggcctgaggagcaccattcaaaccgaggatcaataccggctcggaaggaccggccttctccacccgttgattacgctcgttgaacatcgccttgatacgtccttgatgagttcccgccaaaacgatatctcccatcttcaacgtaccgttctccaccaatatggtagatacatagccacgtcccttgtccaaagaagactcgatgatagaaccaaccgcacgttttttcggattcgctttcaaatccaacaggtcggcctccaacaagaccttctccaacaactcctcgacaccgatacctttcttagcggagatctcctgactctggtacttacccccccagtcttccaccaagtaattcatattcgccaactcctccttgatcttctcaggattagcatgtggtttatcgattttattaatagcgaaaacaataggaacaccggcagccgaagcgtgattaatcgcctcaatcgtctgaggcatcacgttatcatcagcggccacgataataatcgcaatatccgtcaccttcgcgccacgggcacgcatagcggtaaacgcctcatgtcccggagtatccaagaacgtgatacggcggccattctgcaacttcacgttgtaggctccgatatgctgcgtgataccaccggcctcaccggcgattacgttcgcgctacggatattatccaataaagaagtcttaccatggtcaacgtgtcccatcaccgttacgataggcggacgggctacccaatcctcctcgttatcatcttcctcatcagcgttgatcgcctcgacaacatccgcgcttacatattcagtcttataaccgaactcctcagccacgatattgatcgtctccgcatccaggcgctgattgatcgaaaccataaggccgatgctcatgcaagtaccgataacctccgttacagatacgtccatcatgttcgccaagtcgttggccgtaacgaactcggtcagcttcaataccttgctttccagttcttcctgttccatcaactcgtgctcacgtttcacagcggcgtcacgtttatcacgacggtatttagcccccttattattcttattattcttgttggtcaagcgagccaaagtctccttgatctgcttttgaacatcctcttcgctaacttccgctttcaccggcttcttcaagcgaggcttacggtcgttattcggacgatcgtcacgattcgggcgcggataattcgtacccggcgtattattcacgtctacccgatctttcttgatacgtttacgcttcttcttagcgtcaccttcctcacccggtttagcaggagcgttcggtttaatcaaagtcggcgaattcggactcttatgaggagcgcccggaccgttgctattattacccggccgattgttattaaacttttgcttctcatcacgctctttccgcttctcctccttcgttttctttttcggacgagtcgattggttaagcgcatccaagtcaatcttaccggttaccttgatctttgactccaatttaaccgagttcaaacggaaaagattatcatccttttcctcggtcttctctacttcctgttccggtttcacactttccaccttaggttccgcaacaaccggttgcttctctacggttttttctttttccacttccactactataactttttcttcttttttctccgtgggagcctgcgcaggctgcgcgggtttaacaggagcttgagcagcgggagcggcaggcgcttccttcactttcggctcttcctttaccttaggctcttctttcaccttaggctcctctttagccttcggctcttcctgctgttttttatgttgtccaccatccaaatcgatatgacccttcattacgatcttaggtctgaattcttccggtatcactgtctttatttccgcggtcttctcttctttcacagaaggaacctctttccgcacacgatccgccgcaaaattacgatctttctctggcagatcctttccaaactcttttacgagcaaagcatactgttcatcactgatcctcgtgttgggattatcctcaaccgagaacccattccggtgcaggaactcaaccaccgtgttgattcccacgttcaattttctctgtacttgaattaattttataggcatatctaactttgtcgtaatacttattcgttaccttcatcttcaaattccgcggataagatagttaaaagatcgtccacggtctgctcttccagatcggcacgttcaataatctcattgcggtccatagcaaggacactcttcgccgtatagcatcctatattcttcagtgcgtcgatcacccagctgtcgatctcgtcggagaactcatccaagtagatatcctcctcgtccgctccttcgatatcacggaatacgtcaatcgtatactcagtcaacatacaagccaacttaatattcagaccgcccttaccgatcgctaaagaaacctcctccggacgtagataaacctcagctttcttttcctcctcattcacacggatagaagagatcttagccgggcttaaggcacgctggataaacaaagagagatttgaggtgtaattaatcacatcaatgttctcgtttctcaactcgcgaacgattccgtggatacgagagcctttcatacctacgcaagcgcctaccggatcaatacggtcatcgtatgactcgacagccaccttggcacgctctcccgggatgcgggcgatcgccttgatcgtaatcaagccgtcattaatctccggaacctccaactcaaacaaccgttgcaagaagaccttatccgtacgggaaagaaggatcttcgggttgttattatagttatccacacgttgaacgatcgcacgtacggtctctcccttacgatagaaatcggtcgggatttgctcggatttcggcagtagcaactcattaccatcgtcatccagcaacaggatttctttcttccacacctgataaacctcagcggcgatgatgtggccgattttatccttatacttagcgtacaagctgtctttctgcaattcaagtatctttgaagccaaagtttggcgcaagtttaagatcgcacggcgtccgaagtctgcgaaatgcacctcgtcggtcacttcctcgcccacctcacagtcggcatcgattttacgggcctccgtcaacgtaagctgcaagttctcatcctccagttcatcatcagccacaaccgtacggtttctccagatctcgaaatcacctttctcagggttgataatcacgtcatagttctcatccgtgccaaacatcttggcgatcacgttacggaacgaatcttccaaaacgctaatcatcgtatctttatcgatattcttcaactccttgaactccgcaagggtgtcaatcatactgattgtttcctctttcttggccataatcttacttgaatcttattaagtattttgtatattttatttcatcaaatgtatacgactcatcctccaccacagtcaccttccgcttagcgccttccggtttcaccttcttctcgacagagacaaccacaccgttctcgtcggcagatttcaacacaccggtcagcttcgagccgtttttcaacagcatctccacctcgtttccgatgttcttgacgtattggcgaagtaccttgaaaggagaagtaatgccggcggagccaacctccagctcataatcctcgacgtcacgatccagatgctcctccaaataccggctcaactcggcgcaatcatcaatgcttaccgcttcatcgttatcaatttcaacgactatcaggtttcccggtttaatcaccacgtctactaaataattgcttgaagaggctagtttttcctctattaattggcttaccactttcttttctatcatacacatatctgttaagaacaaaagaaggggactacccgccccctcctcaacttcacttaatcgcccgcaaatatacaaaaaatcaatgagttctcaaaatatcctcatctttttacagaaaaaattaatacgacacaaaccggattactatccatagtaatcagaattaatatctatagaaatctgatttactattgatagtaatatttattaacacttttatgcctatctttgctgccgaatacgaaggggtgctcgcaaaatccttcacgaaaggagcgggctgagatcatacccatagaacctgtacaggtaatgctgtcgtagggattcatgcttctcccatcctttctattcatctatttagttttaaagcaaaaagatgaaaagatgaaaaatgtattggttatcttggccggctccttgctagctacaaccgtcaaggcgcaaatgcccagtccggtcgactccttgaaaatctcaaaagacgtatctttggatgaagtggttattaccgctaccaaagtcgggaaagaaaccccggtagcttatagcgacatctccaaacaagagctaagcagccggaacaacgggcaaggtatcccattccttatctcccaatccccgtctgttatcatgacctcggatgccggaacaggtataggttactccggttttcgtatccggggtacagacgcaaaccgtatcaatatcacgatcaatggcgtaccggttaatgactccgagtctcataccgtattctgggctaatatggccgatatagcctcctcggtagaatcgatccagatccaacgaggcgccggaacctctacgaacggagccgcagcttttggcgctacagtcgccatgcagaccgagaaaccgtccttaaagccttacggcgaatattccgtatcagcaggttctttcggtacgctgaagcatacggtaaaaggcggtaccggattactttacgatcatttcgctttcgacgcccgctactccaatatccgtagcgacggctttatcgatcgtgcctccgcccgtatgagctcttactatgcctccgccgctttctatgccgataatacattgattaaattccaagccttcggaaacagcgagaagacctatcaagcatggaacggtgttccgtcttatttacttgacacagatcgtagctataatccatgcggagaatatgaggaagatggagtgaagaagttttataacaatcagacggataattattggcaacacaactaccatttaatggccagccagcgtatcggagatttctggaatatgaacctgacccttcattacaccgatggtaacggatattacgaggattataaatcgaaagccaaattcagcagttataagctaccggaatatatcgatccggagggtaataccgtaaaaaagacggaccttgtgcgccgtaaatggctcgacaattatttctatggagccgtttatagcgcgaactatcaacatgacaacacccgccttacgctgggaaccgccgtcaacaactatgtaggcgaccattttggccgggtaatgtggaccaaaagcgcaaacgtcttgccacaaccggattacgaatattaccgcaataccggtaagaaattagactacaacgcatacgcgaaattgacccaacgtctttcccctcttttcaccggctatctggacttacaataccgtgggatccattacaccattaagggaaacgatgacaaagccgaggaagagctggacattcataagaactggaacttcttcaacccgaaagccggtataaacttccataataacggccataacgcattcgtctctttctccgtcgcaaatcgggaaccgaaccgtgacaatttcacggaggcaggccccgaagaacgtcctacccacgagaccttatatgattacgaggccggttatagttttggtaacaaccgtttccgggttggagccaatctctatttcatggattacaacaaccaattgatcctgaccggcaagatcagcgagatcggtgaggccctcacttccaatataaaggatagctaccgaatgggcatcgagcttaccggaggtgtacaaatcacctcttggctgaattggaacgcgaacgtaaccctcagccaaaataaaatcaagcatttcgtggaatacgtggataactgggataccggagtacaagagatcaacgatctaggtacaacgaatatcgctttctccccagacctaatcgcaaacagcatgttcgatttcgcttacaaaggatttatcgctagtttcaactcgcaagtagtaggccgccaatacatagacaattcaagcagcaaggatcgttccatcgatccctactttatcaatagcctacgtatcggttacgccttccagcctaagttcatgaaagaaataaccctagacgtgactatcaacaacctcttcaacgagaagtacgagaccaacgcatgggtatactcgtatatcgaaaacggcacacgtaaaaaggatgacggttatttcacccaagccggcacgaacgccatggccaggatcaccttcaaattctaacttaattttcaattactaaaatggtttggctagaatacttcggagtaataaccggtctactctatctctttctagagattaaacaacataaggccatgtgggtggtgggattcctcacctccctcgtgtatgtatttgtcttcctgttcgctaagatctatgcggacatgggattgcaaacctattacgtaggaatcagcgtatacggtttctatcaatggacccggaagaaacatgagacacacacggaaaacgacagtcttccctccgaccgtatcctatacacccatctgagccttccgcttttcgtggggattatcggaacattggccgttgtattcgccatcttatggtatctccttcatcaattcacggactctcccatccccgtaggcgatgcgttcaccacgtcggtaggcattgtcgctacttggatgctggcaaggcgaattatcgagcattggattttttgggtaatcgtaaacctcgtttccgtatatctttattaccttcggggcttgtatccgacgatgctactctatttttgctatgcgacactagccatagtaggctattacaattggcggaagaaaggggaagagttttgaattatgaattttgaattatgggagataatatggaaagtctggaaggaggatgtgtgatcgtagcgaatgggagatttccttccgctgagttacccttgagattattaaaggaagcgaaaacgattatcgcttgtgatggagccgtaaagacactttatgaaaagggtattcatccggacgctatcgtaggagacttggacagcatacccgccggcctgcgcgaacgctacgcagaccgaatccatcatgtagaggaccaagagatcaacgacctcaccaaatccgtccgtttcgcccatacccaaggctatcgagaagttctcatattaggagctaccggattgcgtgaggatcatacattgggaaatatatcccttcttatggactatgcccacttattcaagcgggtggagatgttatccgactatggccttttcactcctatcttagaaacaacaaccttcgcttcttatccgggacaacaaatctccattttcgttctttatcccgaaggggagattagtacggaaggactccgttggcccattcgccgacgaaagctcacctcatggtggcaaggaactctcaacgaggctttgggagaccaattcactatcactctctccccggattgccgggtaatcatttacagggaggcatcccatacaaaagaatagtcctgaaaagtatcactactttccaggacccttacacccctcaactttacatgcttaaataagaagcgttcgcttccttatcaagcagataatttttttaactcattctctttccattcggaaaaaccttctaccctatcccttatctggaactgtagcttatcgtcggcaaccaacttcagcacagccgtgggagaaagcggcaaatacatatcattcacggcgaaaaaagctttcagtaagaccacatcatagtcgctgcggatcacttctttctttaatacaaccggcacctccatctgagtcagataataggctgaacgttcgtatgcgcaccaagcatctccttccagatacagatagacattgtttggattatctacctcatgaggcagaaccaactctactacatctgatgcttgttccatataaaagaaattattattaatatttgtcttcatgacatttacaaattaagcgccttctatcctatacatagggaggaatagctatcattttacagcgttgaaactatcaaataccgcattatcctctattttcttgcgcaattcctctaaatttatcgccgcggcctttacgcccatatcctgagcctgcttcaatagagattccgcttctgtcaaatcaccggtcaacatacttaacactcctttcgcgtgaaccgcctccggggcgttccccgctttcgccaaatagttcttagcggaagcataatcacccttgcccatagcgatattcgcggcgttaagattcgctaccggatcattcggaaacatacggacagcgatatcaaatacattattatattcgtcactaccgatctcatagctgttagccaccgcgaacatctcccctaaacttagctgttgcggacgagtcttgatgatctcacgcccctcatccaccgtaaattcacgtaccgtataatcaatcttatattccgagcgacgtaacgaagggaaaatatctttcagcacataacggaaagcggcgccaccacccaaggcacgtaacttagcctccttgcgatccggatcatccgagctatcgataatcgccaatacctcgctacgattcggtacattcggatcggcctctaccttttccttaaaaccggcccaatcttccggttccgagctcatcgtgaagaaatcagccttgaagtcattcttctggcggatatagtcacgtaacgctttgacacgattatccgccaatttcttattactagcgtaagagccttccggtgaggcatatcctttcagtacgatacctgtcggtttcacgttcttatcctctgtaacggtacgaatcgtattattgatcttcgccaactccaccgcattattacggaaatcaggaagaatctgatatttacccacttggaagtccaaaaaagccgtaccgacctccgcacgatgcttctccgtctctgccatcggcgtgatataagagaatgtaggctgaacctcatagcgcttatccggacgacgacgaatcttgtccgcgatcaataacggactaccggcctcttccttaccacaaccgcatagattcgggtctaacacgacacgtgcgtctttcatccaatcctcaaaaggcacggcggttttataacttaccacttgatcttccttcccggctttcaagatagtataatgaggtacgtcgttcaaattatccaaggcgacctcacggttatatactttctggcggatacgtccgttcaccaaaatagaaggaagcccctctttttgcgaagccgattccaagacgggggtcagttccaaatagctacgggatttcaccgcatcgccacttaccgtcaccacggcatcgatatataccgagtcacccttctgtaccacgtcgttacaaatcactttaaccccatccgaggcagtctgtcccatgattgccggagacacgacggccatcatagccgccatcatatatgcatttatcttcttgttcatcgcttgggtcatttaataaagtaaataatagaaatagcggctttcgtaaccccgaaataatctttcgtatcgcttttcaatacggttccgcaagtggcacaaggatatttatcataatccagatgcgcccaaccaatacccaacacggcttccatgctccaccgatcgcttaacaaccactgataaccataagagagtccggcgccatacaaattaccttgataacggtgattctccatattcttgctcaagaactttaggcctccaacattgtaatccgcataatgcgcatgcaagccgaagaaatgtccattgaacttctcgcacaaccaataacgagcttctggttgtaccagccaatgtttcatacgagcctcatcgccaaacttccatccattatagttgccggatagatccagcgaccactttttcgccaagccaacctctacacccaaattgatcgtagcagtcgcatcatagagcaagttcgacttcaccgcgaacttctggccgtaaacgcctgtcgtagctaccaagagcaggactaggaaaagaattctcttcatatcgaatattttttcgtttttattatacatacgtgaatgccttcacttcgacgagctcgcattcaactgtttaagtaataatttaccgggcttaaacttcacgcttttacgagctcttatcatataagccactccattcttaggatttctgccgatccgttcggtttgttcccaagcggagagcgttccaaagcccaatagcatcaaagaaccatcactttccaaagcctctgtcgtagtctcttcccaagcttgaacaaagcacatcgcctccgcttgcgtaaccgacaatttatcagccaatgttttcacgagttctctcctattcatccctttcacttttaatttgcatcacaaaaatagattataacatttcttagcacgataggtgtgagtttcaactttaaagggtaaacctaccaactatccttgattgataagaacacctattcatttcaaagaaggtgataggaacaccgacactttataaagacagcaaggggcagacttgtgtaagcctgccccttagctgttataccatatcatccacatctaacacttaatctcttccttgcgaatgagattctccagatcgtttatctcctccaaggaaagccccgtacattgggcgatcacagagggctccaagccgattctcttcaggttctcgtcgtagatggcacgctcctgcggggtgagggcacccaagttcgccacgtccagcaaacggcggaagtgggcctctttctcctttaatggggacatatcaaacaggttcatattcttcagtacataaattgttttttctaacggagtaacgcactcctcgtaacgcaaatcgaatcgttcgaaagagatatagatctgtttcagccgaatccgcccaaaagtcttacctgtttgctcgtttgccagaaccacgtccgttcgccatgaagggaactcgggaaggctgaagttcagaaaacgtatctatgtcgtaaaggtaaggactattttccgaataaaaaatctcgtctagataaaataagccattcatatcactttagtatcaaagatcaacctgttagccaaacgaacattatctgatccttttgatcaatataagacgcatatcgtggcattcccttttaacgaaagccacacaataaagacatggagcgctgctttattcatgttttaggataaaaaaggacggttttcaacgcacattaggaggcaaaagcctacacatacggtggcgttgggcatcgtaagcggtcgctaatagggttataagcggtcgtgaatgggcattcttgtaccgttacaccccagtcgtaagcctgtttttccccttttcaccctacttgatatgaattacgatgaattaatttagctagaatgaaagggcatttttcaacatctacgtatatgctaagcaattactgtttttttcttgcgtatttggaggcaagtcgtaggtcgggacggaaaaagggattctccgggagttaagaatacaaagtgtcagattgatttctgttaaatagagagagacgcagcatgctgcgtctctacaactagatatatcaatttatttttcactcctcacacaacgaacaaacatgccgttattcgtatttaatgttccgacattaataggaacattggtattcagagaataccaaaaatctataaaaagcatattcgtatcagcatgagagtcaccagatccagaccaataaaaagccccatatcgatgggctgtattatagagaagtcgacctccacccaaatacccaataccaatctcatcaatccctgtatcctctgcagcactcccatgctcagtcataacagcctttccataagagaagaacaaattgacaggttctccagtagaacgaaccattaatgtccctttagctggattgcaatctatagtttcatctataaccgcattgccttctgaatcccactgccaaccaaaaggagtattctcaaccggacaactatcatcatacacatatcctccatatgtaaataatgtatttttctccgtagcactcttaatagcactgtaatggctagccgcaggaactttataaccactcggacatggactttgcccatactcccatttgtatttttcattgcgcatgtcctccgatgttttttctttccaattcaaatgcttattaccataagtcacatcccatggtgtataataggaatctgaagcccctccttgataaaaatatccagattgggtcggagcgttggtgatagagccttttgtcgtacaattgaataaagaccaagttgccccaccatccaacaattgcgtatccgcataaccttgacgcaaataaatcatatgctcgcaacggttattatgataggttaccttgatagcgccataacgattggtggaagaacttcctgtgctcgaattcggtttataattaaaaacaatatcacctccagtacctgtaacagactccgatgttccgacgacagactgtccgtcatctgtagatagcgtaaaccaatctcctgcggtaatagtagctgtccaagggccaatagaattcaatatctcatactttctcttctccttattaaattctcgcaccttaactttgacaagctccctgttgtcccatttcttatagaaagctatcggatcgaccaaacggataacttgattgacagttacagttttagagattgattttccatccttccctgtagccgtaatcgtcacggtattagttatgtgatccttactactaatattcgttttcttcgtgataactcgaatcgtattcgtatttttatcatacgcaccaatctggaaatcctcacgatttgaaccttccacactccatgtacaattatcaaaccaaccatggtctgtcggtaacttcacttggatatcacttatagagcctatccgatacccgatataaatatcatccaccgtaaaatcccagttgaaatctttcgtcacacgccaagaagcctcgtcaaccccgcccttaccggtaagattaagcgtcacgttatagtgggcgtttcgctctaccgcaaaattggtaaaagcgtcatctcctaagaaaaagcgataaacaatcttcccactagcacccatttctgaatactccgcttccacacgaatataagaacaagtcttatccgcttccacagtggcgacatcctttattggggtgttacctaaactggccggggttttatatgcctctacatactgtccgtctttccataagcagacaccatccggttgcttattctcatacataaagaaaacactgttatctttcattgaactaacattctctaccggattggaaaattcgatcatatcagcctccgttatataatctgaaggtgacggatttgccgggattaagttgttcataaacaatttaccagtagccggtacttgatgcaaagatacttttaggggcttgatcgtacgatctttcaatccagaagtattcacagatacggatatcatagcgtaaatacgctttaacgaaaggatggcagaaccttttcctccgctaactgatacatcatcagcggatgcgctcattaccatctttggcaaattatctaacgttccatacgatagattatctatcttatcgaacggctccgcactcaaatcagattctgcgttcgcaattactcgtacacgataagaaccattctgtaaagctatatcgtaattaaccgccttattctcttcgttattatttacggtaaggccattcaaggctgcaccggtcaaatacaatcctttaactaagcgattattatccttattatacacaaggatattcaaatcgctaatagcattagcatcagtagccgaggctttcgtgagcggagagatcacgtcgctagcggaaacgctcaaggacagtcgtaatccatcaactttctgctctcctccattcacttccgtctcttccatgcaggaacctagtcctagcattaacaggcccaagaacaaggcatatatatatttcatcgctttcataatattctatttactgtttaattaaagtttgcgctaacatctttcccaacccaaggagctacccatatcttaaattcacctgttgattgtttcaacattcctgtcacatgataataattaccgtggatcaaaccgtccgtgcattcacccgctttatattcagggttgattgggatggagtattgatagtccgtactctttccagtagaagttatatctattttagatacagtttcacccatttccaattcttccgtattgataataaacttagtgtttgaaccctctccccagcctccattttcatcccatatgggatgaaaacctgtagacttcaacttataagtcgctatttcctttttatcacccttaacgtattccccaactatcttcacagacaaggcttttgttagatcactgaccttgtctctttcatacgtgtaaaaagataaattgaccttagtatctgccattcctcctaggataaatccatctctcaaaccaatcgcatcattcaattgatttgtggggataatcagtttcgattgtgtattcacattcaatacttgaacacttatcaaattaaacaaccatgttggagttgtagtagttatcgccattgtaatagggtttcccgaagaaaaactttctatatgcgcatatttattactagtattaggttgattagcacagtctttatccgcagagttattccatgcccgcgctaacgccttagcaccagctggaactttttctcccgatcctgttgccttcaatgcaccagactgatccacatatacaataacaggtttatttttgttagatgcgctactcattcttttagataacttattgataatgtcatccatagaataaccatccaacgtccacttactcgtagtcgtagagccttccatcttcgacaactccacatccaagtccaactctactttcgccaccaattgcttcaaatggacatccttgccgccagaaatcacaccgctagtagcggtaaatttcatatcctgctcgcctgcctttatcaaggttttcggatcgaatgtataatagccctctccacccaacgtaccagtataagttaccgtctcggcacttaacccattataatccatttccgcataagacgcaaccttgtcctccaatggattcacgatagctaccaccttcagttccgtgttaagcggcaaggtcaaaccggtcagtttaaaggaacccgagctttgcgtccctacaaaactaccatcacctaaggttccggtcttagaaatcaagtatttccactcgttatctaccttcttgaagatagagacaaaaatattgtttatgttaagttcatccgccgtagcgtactgataagtaccatcggcatttatcgctttcgtctccacgccctcagtagagaaagagatcgaaaccgtacctgtttccatcggtcgctcatctatcagcttctcttccgtacatgcggtaaaggccaagagcgccaaaaatcctgtcaatactatatcttttaactgcttcatgttatgtttattttaccctgtctacttaactggttctccaaaaatatcaccgacactcaaggtattcggtatccaatcttcaattacaaaatcaatatcctcgctggcattacctattgtcacagataacttatagagattccccccaacaaccttcaccgcatctcccggctttgtcttgatcggataggtacgatccattaccgcgccatcgaccttataggttattttcatggaagtctgacgatctgtatccgtattatcatagccataaaaacggatcttatcgtaagtaccgtaaatgtctttcttcggatcactctggttctcatcggttggcttcagaatattatcatctactccggaaaaagagctaccatactcacctaccactttagcgcttagcttaatgttcagcatctgtacggaaacgacctctacattcggtactaccggatacccaccacccaccttttctttacttgtgtctaccaccttgaaggaagccagttcaaacgccgcgactctctgcgatacgggaattgttattttattacaattcccgtcatcgtgagtagccaattgagtagttgtttcataagccccaatgggttgttctcctacttttactagaaaattaggatgttccgccaactctacatctcgaatacccgctatagttgtacaagtcaataacttatcggcagtcgtctgtgtcaggtttgccaccgcataagccgtaagtgccggcttatcacttggcactttcacgatcatgtggcgcttgatatccgtagtaaaggactcgctactcgtctgtaaatcgctcgttgcgtaccaataagaagacaatacattgccatctttaataatagctacaaaacaattactgatagaagattccgtagaagtaacatcattgggattttccgttatttcaccagccttggtcatagagctattgccggaaagagagaaggcaaaaacggtctcggtgtttgcgatattcgtcccaacgtctcccatatccacgttattcaaaatatcgtcttccatggagcaggacactccgatgcaaaggaagcataataatgctagtatattctttattttcataatggattgaatttttctcttgttttacactagcaaaattagaggaatccattattcggcacgataggcgtaactttcaactttaaggggtaaaactagcatattgaatataggcatttgagggtgtggctaaagctatcttaggcgatagggatacctatgcagggcgcaaatccatccatcataggacaaaaaacggagtccggaaattccgaaccccgttctcgctattaatcgttatgaaagagtttaatcaattcacgtctgtctcagtttgcgtgatgactctccaaggctcaaccttaatgctaaaactgatacaagcgttcaactcgcttgtgtcgggatccttagagccttcaccggttatcgtagcgtatatcttatagatggtattacgttgtacaccaataatgccactagtcgcatcttgcttaattggtatacggtagtagcgatctcttttaaccacatcattaccgagtccttccgtttttccatttggataccaattgccccgaagaattaacatggtctgtatcattccagatggagaatcacctttattcggatcatctgcaaacatctgtttattccccttcatttcaaacacataaaattgaggcatctttttatgtccatattcatcaccgctaaccgtttgatcatcaaaagagaaccaactgtcaccattataatttatggaaccatcgccgttcaaattagaagaatgactatgacccatcattttgatgtctacccctccatccattgtccaatgtaaagaagctacatcattcttacctttcactaagaaatagtcatcccgcttatagctacaaccatgagaatatgtggtagcattgtccaaactatacggttttgcgtcagcatagataagagaagtattgctagcgttcgcaatatatacatgtgtcaactcaaatgacgcatcagcataattgttcttgaagtcgcaatcaatagcttgaagttggacacgggctacatggcgggttaatgggattttatcagcagctagaatatttgccggatcataagaggaaccattttcagtccattctgccgcttcactttttttctcaatctcattatgtgctgcacctactgtcgcattgtttgtatatataatagaaggggccgtagatcctttcacccagttatcatactttgtcccagcaagcaactgatgctcacctccaccaatcgtaactatctggctgaacatcggcacatacgtttgcgtaacacctggcgctggatgcacatgcgtaaaatcaacgagatcttcaagttcggcagttttcacatcccccaaattagaaggaggcgtagcaagtttcgtattcgctaaaaagaccaccgccaattgcgtatcagaaagttcgccggccgccgtagcttttaccttaacgacaatatcttcaatagtctttacggaattaccatcagtagaggataccgtcttcattgcggcgaatttgtatgcatcctcgttctccccattgtctacataaaacaaataggcggttagttcattaataaattgctcgttattactgccagattctagcacagcatcaccgccctctttcgttgcaccttttgtctgtatcccatccaaagccgtagcggtaagagagacattcgcatctatcatctgatagttcttttccggtatctcgataccattcgagctatcgtccgagcaggaggcgaaagcgcatgcggcgaaggaggctaataataaatgtcttagtttcatatccttatgttttttcttgtttatactaaatttcattccctatgattccataatttagtctattaccggacgttgtaccaccgggccccagcctactacctgtacagcgatattcaggttcgtatctacctctggttccggatctggatctggagttggatcaggagttactggaatattgtcgaaactttcgccgtcaaaataaatacggagacggtaaacgtagttgcgacggatgaaattatgatcatagccgttctgcaagccacccgcattgatcaccgccgtgaagattttcgtatggtcttgataactggaattcccctgcaaggtagcttttacggcgatcatcgtgtgatcgtcgcttttcatattttccattacataatgaacgaatggcgtattggatatcgaagcgccatcatttaccaacagatcctcgaacgaggtatcctccgaatttcgcacggcatcgggagcctctgtctctccccaatccgcctcactgaaatagtaagactttgtcttcatattgtagatacctaccgcatcgattcgcacctcacgtccagcgaacggcgttccggcaaaacgagtggatatattcaccaaatcaatacgtgcggctacacgggtcaaaaggatcgggtcggagatgccatccacattctgatcgccaagatccgtatatcctaaatagttatcttcctcagataaagcggattttgtaacgatcacttgactactcatcgttaggttcgtttgcgattgcgaggagaggtctaccaagcgagtctggaactcatcgtatgtagaaacggtagataataaatctctcggcacgttcgccaagacaatgatccgtgcccggacagccttcgttgtcggcacatcggctattatggcggaatgttccgccccggaaagagcctcccatttataaccgagcagttccgtgccggtctcattaaatactaccactgccaaattattgatataagcctcaccctccaactcattcacgtcattggggttataggctttcgtagccgtaccggacgccttgacagcgacggacagcttagcgccttctaaggaaagagccggatcctcatctttagaacaactcacacaagcgagaatcgccaaaccggataaaaatatgttcgctaataatttcatgttcgtatcgtatttcttaattatatatgatgaggtaccctttaatgcatcggaatatcttcttccactactccccaaggacgaacggttgcccggacggataaggttccgccctcaccccattcaaggatcagatgggtattctctcccgcgctcgtataaataggatcaccgttctcgtctacgttggccgaacctaacgagactccattggcacttatcgacacagccatatcctgtcccggacaagcggtttgcatagtaggggttatccattcaaccccggactcgttccacgcaccttccggattataatatacgctatcgccaatctgcgtgccacggtaatcaaaaccacttaatgtattattcaagtagaagtcgcaatccacggaacttctcaaccccatcctgccgagttgctcttgcagcccccgggtctcgatcgtgaccgtacccactttcggacgaatcacgatctcagtttccttcgctacgcctccggcttttgtcaacacttgttcgctaccataataaaggctgtccggggtaactgccaaaccatcttggcttttcaacatcactttcaagtcctctatggtctgggcctccgatacggattgcttttcacccaaggcattcacgttgccccatgccacgatacgtaaactacgatcggcggtatagccatccaaaacaatctcattgcgagaacggataaagttcttatccaagcgacgtttctccaagtaattcagattctcgtcgaatatatacagatcggtagattccatccatccgtattccgttatatcgtctcccttgatattctcgaccttcagtttgagcgtatagcattgatccaaatcctccttgatgcagctagtcgctataatagcgaacaaagccacaaccaagagaagcaattcctttgtaaacagtatgtgtttcataatcctaattttttcttatcaattattttaccctatattgctttattctacttcctcatggatagtcttcacgttccatggctccactttcacggatgcgctcacattggtggagatcatcgggtcgtatgggatctcggaaccgggaccgataatcgttaaagagatctcgtatttgtagttacgttggacgtaaaacttactccttttttccgtgccatcaatcgtcacttcttctccgacaggaatcgcataataacaattctctttcgtaatagattctttcgcaccttgcgggagataggtataatcaccttttacgatcaataaggtatggttggcataagcctcattgacgttagattcaccggacttcacctcaccctttgtattctcgtaaacataaaattcatgattcaaagcctcatcacttgttgtattttcttgaactaacatctcttttaacgcctgagcccctttcttgtaagaaccttcgtcaatattctctgaaaactctcgaccaaccatatattttaaatatccaagagccggatctgtaaaatcaattattttctctatcgctccccactcttctttagaagccacacttgaaacacctttagcgctagcgataaagacctcctttaaaaggaaggatacacttttataatttgcgttttccggattgcttgtctctactttttttaaagcgatcgaagcgacattacgaaccaaaggaacggggcctcccccacaaatttccttacctgaagtctcatttatcgttattatatcaccaatattcttagcataaccgatataattgatggtattggctattagcgttacggtaaacactttactactcatcgtcaagccttttgtcaaagtctcgtcagacagattgattgttgtttcaataaagtcagttatatccttagcctttgccaattcggtttggataacaggggcagcgttcgccacaaccactacatgagcttcacccgcatacacttcttgcggaccgacatcctttgtcccatcagagttaggagtagcatcttttgtatatatcacactccatccatcaactccaaacaccccaaccgttagcgtattcacgtccgcatccgttggagtagtttctccggccttcgtaaccgccccttcctcactcttgatagccaaagctagttgagctttctctaagacaggagcctttggaatttctatttcattatcatcggaacaagcggcaaatccgcatagcaccaacgataaaagaatgtatttcttgaatctcatagtataatattttttgttctcacattaatatgtgacaaaaatagaaaggatatatcgtggtgctgataggcagaactctctataataagagacaaatgtatcaatttcataaaagtgataggtttccctaccttttgcaactttcacctacaaaaacaggctcaatccgtgtattttatgctaccggggtggtactcggatcatcctagtaacaaatatacataatcacttaaattcagcaaaatcatggcaagaaaaaagaatgagatgaaagcgaaagagcccgtaaagctccggttcaagaaactgtcgaacgcgaacctgtccatatatctggacatctattacaaagggaagaggtattatgagttcctcaagctctacctcaccccggaacgtttccctgaagaccgtgataagaaccggatcactttgcgcttggccaatagtatcaaggcacaacggatcattgatcttcagaacgagatttacggtgtccgtatgataaacgggctcgggaaaaaaacacttttagaattcctctcggaattgtccaccgataaatctgcgcatggcgacaaagcctattccctacgattaagaagtctggccaatcatcttagagactatatgccgcaatgcctgcttaaggacatagataccggtttcgtgaaaggtttcatcgctcacttgcgtaaacaaccctacctcaaaagcgacttcacgattcacggttattaccggctcctgaatgtcacactcaataaggtggtcaaaaaaggactgatcctctcgaatccttgtagtttgctggatacagacgaaaaacctcacaaacctaccagcctgcgtacttatttgaccctagaggaactaaagaggttaatccggacagattgcgtatgcccagaggtaaaaaaggcttttctgttctgctgtttctgcggactccggatcagcgacttgaccgctcttagatgggaagatatgcaaaaagaaggaaatgataaattccgtttacagatcatacaaagaaagacgaaagaggctatttatctcccattgtccgaggaagcgataaaataccttcccgcaagggagaatgagaatgacaggctcggcttgatattccatctacctagcctcacgattatatgtcaggtattaaaaggctggactttagccgccggcatcaagaacaagaaagtgacctttcacgtaagccgccatactttcgccactctttcactagctcttggcattgacttgtatacagtatgtaaattactaggacacaagaacatcatctccacacaagtatacgcgaaaatcatcgatgctagtaaaagacaggcaatagaccggtttaatggcgtattagacgcatgagacggatattacttcagattcgtatggcacggatcaagaaagatacttctccccaagatccgtgtcatccgctatagtttcagtccgcaactggcttatcagatcagagactttgtattatttccaacgaaagccccgtgcattcggcgattaatgaaagatcgacaccggctttcttcatgttacgagcgttgcgtagggtagccaaacgctcaccttctgctttaccttttgtttccgcctcctccacggcgtactccatcgtggccttccagtcacggtagatcttcagattctcatcgtacgtcgcacgctccttgggggacaaggcattcacattcgctacgtcgagcaagcgtcggaagtatgcctctttttctttaaatggggacatatcaaatagatttcatattcttcaatacataaattgttttttccagcggagtctcgccctgacgggagatcatacggcaaatgtaataaaaacctcgattaaagaagtaacgttgagggtaattaatactactgagttgttacttcccttcacacaacaaaagcctaatcaactaaagaacaaccccctataaccattccccaatagaacttagaaatttattattcgggacaatgatcgcttgcgtgttcgcggcgtgttcaaacgaggatgatcctatcgtaggaccggatcaaccgcaaacaggggaaaataacgcaacactgactatttctgtgaaaaatgtggctagaagtttgactaaagctgcagcggaggggacacagactgaaaatgaagctaaaattacaaacttaacagttgctctttatgatgctgaaactggagcgcttgtcgcttcaacctctgatattgccaatgaggatgctgctgcggataatgatgaggttcaatttgccggactgacagaaggtgcgcaattacgtgctatcgcatttgctaatatgcctgaaatctcactggctggtacaacaattgacaactttgtatctcctgtatatacgatgccagctgccggattcgcagaaaattatttaccaatgagtagtggtttgtctgatccattcactttacaagcaggtaaaaactattatggatatactaaaacagcgggagaaggtgaacatattcttgtagcagatcccttgtacttgataagaaatgtagcgcgcattgattttacgggacttagcttagacatgactagagctgcaaaagatgtatacgttgaaggaattgcgacgattgtaccagaatgtgtattcatcatgcatgggcggacgaagtccaatgcagcagatatgggtaatggcaatagctggtggaatgtcgttagcaataccgtatggggtaatgtgtccgcaacttatgctgctaatgctacagattatgcttcaggttatagaggagatttcgtgaatgatgacgctatgtttacgaatatgagaggttctattattgaaggatacaaggccagtttaccagccaccgcattggtacagaatatcgcaactgaagatggtgtgtctgcgactatcacaatcgcccctaaattctatgtgttcgaaaatccccaagttaaggctgctcgtgaaatgaatggtgctgaaaatttcaaaccagaggatcttgcaactgaaattgtagttaaaggtacttataagcttgaaaatgctaaaaagagcggaagtgatgcagtatacaactatgcggagaaaacagcatattggcctattaaaattgctgcgacgaatgaaatggcagcagctacggctgagtatttaaaggatggaaagatccatcgtaatataatttacagtattgacgcaactttagccggtagaggatatgatgatcctactgttcctccaacagactttgttgaattgtttgttaagacaaaggttcttgattggggtagcgcaaatcaatcttcagttgtcgaataatatctattctttgaataacgtccaaaaggcattccttttatcgggagtgccttttttgcatgtataattctggttataaattgatccggagactacaaaatttactatcttttccttatgatggcgatcccatatgtcttgaacctaagagccggaatattatttcatgagaatatctacaatatctacaattcaacctcatacttattgtaaataaatatgttatatagtggttgcagatggaataacatctacaattttcattctgcatctaccatgttttaatgggaaacgcaaaaaaatcacttcccaagcttgcggactcgtatatttagtattatacgattttataagagacagacaaagggattaaagccaataagagtttcaataggtgaagttagtggtttcatactgaagaaacttttatttcatactaaagaaacaaaagtttctctatagcaaaatttttgtttttctatgcaaaaaaactattatttattgaaatacagaatgttatacattatttatcgttagtggtaattgttcgtgctaatctttctggtaacctaatgatggtagatcgaagtttgtagtggtagatgttcactatctaccaccacaagataaattatttacaatcaaaaaattacataaataatggtagatatggtagatgatttagattctctacacatagaacgatgtctggtgcgtgtccggggagaacaacttcttaaacataaatcttttaactttctaattcagccaacggacattgatatatattataacaaaaggcattccctgttgatagagaatgccttttgattattattcaaagaataagtattattcgataacaggagcttgagtggctgtaccccagttcataaccattgtctttacaaacaagtcagctgtaggatcccccttaggaagagtaggatctgcataaccattacctgcgatagtagcagaaatgttataaaccacgtttctatgtacctgaccataatatgtgtcttcactatctaatccatcgataccaatctttatcggccaatagcgcaatacaggagtactctcttcgccgaatgtccaagatgtgttatcgttcattatagcttttatataaacttcaccactgattaccaattcggatgccaaagttgttttatccaagacgaaagcctggccttcttcttccggatcttcttgttctctggccgcttttgtctgatcattaggcaacacataaaaatataaagaattagcaagagtaattgctttacttccggtaatagcagtaccatcccaattctgagtatatgttgtttctgctgtactcaatgcctttatataattagcagcatcgacagttccagcaaaacggccgaatgagttactagagttagtcccggaataataatcatctccatcagcagtttcataagtagtggcaatattaccccaaaccttatctggcagattgaaccactctgtattactttggctttggtctgccaccttagcttttgtacgaccatgtaatacaaaaacatccttaggcacaaacttaatcgttcctgatttgtatttttgactaccatcaaccttgactttagtcatatccaaatcaagggcattcaattccacacgagccacatttctaattaatcctaaaggttttccagattcaatactgtgtcctcctgtagtgtttgagtaaccataataattttcaccttcggcaagagtgaatttagggctaataccactactcataggtaacccattcgcttcttctccggaaaagacatagtaagcagatgtcaactcaaaagagttagcggttgcggtaagagcatcctttggaacattcgcgaaagccaaagcacgataagaagcaccagcctttaatcccttaaactgaatctcattgtttgaatcagtaacctcttcatcctcattagctgtaagatcactaacttgtaagaatgttccgtcttcattataaagggctacaaataaattgtaaatcttagcttcgccttccttggcgttctcatcctcgccggcttttgtctgtgtgctctttgttaagtttttcaccacaatcgtaagatcagcggtgcctgcttccggtgtaggtgtcggatccacgctagggataggatcatcctcgtttgaacacgccgcgaacacgcaagcgatcattgtcccgaataataaatttctaagtttcatatacatataattttatgagttaataaatcttttatataaacctttctttctcaatcactttttacattttcagtcacataacaagaactctttgttcaaatcttccccatgaccaatctgttgttcgttaatgacattgcaaaggtatttggacgataaaaaaaagtaaataggtgttactttcataaataagaggtaaaactataaattttcattcgggatattttcgggctgattagcaccgttgtaaggctatcaaaaagaggttgaaaaatatcgtttcaaaaaacaaataaaaaattttgccattccccgacgattattcgggaaatggcaaaacgattaattcttacccggcagatactgtgaaggagtgacgccgtattgttccgtaaaacgcttacggaaagtggcggtatcgttgaagccgaccatttccgaaacctcttggatagagtatcgctgcatactgatcagctcggcggctttcttcaaacgtaccatacgggtaagctccaatatactactatccgagtagagttttatctttctatataatgtagggagactcatgtttaaagaatccgccaaaatcttcgcctcaaaactagggtcatccaaatgtttctcgatcgttgagataaccgcatccataaaaagattggaaggggaatcatctttctttaccgttttctctccctcgggatgcgcacctacagaattcgacgtatagaaacgtctcatctcatccctacgtttcaataaactgtttaccttacttcgtaacacctctacatcgaatggcttggttatataatcatcggcgccacattcaatgccggctataacatcctcactctctacctttgcggttagcaagacaaccggcacttgcgctaattctgggatgcctttgatttcacgacaggtagcaagcccatctttaacgggcatcatcacgtcacataaaataaaatccggccgttcaactcgcgcgatctctacaccctcctggccattatgagcttccgaaacatgatactcactggcaaaaacatgacgcaggaaccaacggatctgatcactgtcatcaatcaccaacattttcttcccagtctctttctttttcggaacaacttggatcaactcggcgatctcctccttctgcatctcattcagctttaccagatcaccatctggctcgatgaattccacggcacgttccatataatggcttctccccaatggaatcaatatcgtatattgggttcccgtctcgtcctccgatgaaattccttcgaaaatagcgccggaggattctgtcatatccacgatctgtttcaaacccaaacgggtactttcgctttctcctaacccatcatcttggatagagaaagaacaataagccttaccattcgagcgtaccacggaaatattgatcgagatctttccaaagcggtaggtattttttaacgcattagataaaagtacacgcaaggcaaactccatcttccgacgatctatccagacccaaagaacagaggtttgggtattaatatgaaattccacattattcatggctatccagtccacgaataaatcacaaatctgctttgttatactgatcatgtcataacgagctatccgaagatggtttgccacgtcatctccatgacgggtatttcgcaattgctcgataaggtcttgaagagccaaagtattacggtaagcagacaataattgagtcgcttcactagagtcaatatcatttttacgttgcaacaactcactcaacgaaccaagcacaagcgatagtggagtacgcatttcatgaatcgtttcaacaaaaaacgaattatggagcttttccatttcctcaaggcgctttttcaaatcctcccgttctacctcattatccctattccaattatcagtctcacggattttattgaccaacatttgttggatctcccgattttttacgcttaacgcatcgacagaccgaagaagctcatcgtttctcgccataagctcaccacctttggcaatattctctttcttcaacctatacatataataactcaaaaaagctattacacatatggacactatcagtaaaatgataaaaggtagaattccttgagagccctccattgtatcattgttcgcagcaatataatgagcttcaacgaacaagccccaaaatgccatcataaatttcgctttaaaaccttttgatctcatatcattgattattaagatgttatttatataaaacgccagtaaaaaacgttcgtttaaatcttgcgtttttatcttcaacttttttgcagccttacaaaggtcaaaaattttatttaaatttcagttattcagttggataaaaataataaaaaaataacatgattatcaatgagacttcataatttatgcacatgaaaacgcaagatttaaacgaacgttttttactgtcgttttaatagacgttaacaacaactgcattcctatcacacaacagaggcaaggctatcaataaggaccagcgatgatatatttaccactcaaattgacaggaataaacccattaacattatttaatcatcatccgaaacatgcatcaacagaggaatatagaggtataatgatagttttacccacttttttgataaaaatacccatcacaaaagatacaacctatgatttttatacatacatttgcgatgtagtgataaggaaagaccgttgaggggcggtcaaaaaaaccaagtcacttagattaagggtaaagcatataaaaagtagggtcatgaaaaggggtaattttttcgcaaattgcgtatttgcggtttctgttattttaacagttttgtcattctccgcttgcacggatgattcaaatgacgtagtagcaacaacaagtgaggttattgaacaagccgaagtaccattctccgtggtattaaaagcaatgaattcagatggtaacgacattacgaccaagggagaggtgaatggagctacattatttgtcttcgatcaaaacaacgatttcttcgagcagattaatgtaaacaaatctacaattttatctcgccgggctatagacattaactgtccgaacagtaatgacataaccgtgatcgcatggagtggaatcaattctggaaacgaagagatttcaaacatgagcaaagccaatattatatccgatttgcaagtcagcctaaaagagaataacggcatagctaatattccgagcgatttgttctatggacaagttacgcttcataagaactcttcaacaaaatccaccgtatcaaacgaattacaaatcattcgcaaaacttcaattttccagctttcaacaaaaggactgatcaagtatctagggagtaatgccggaaattttgaatatcgaattaaaaatacaaaaagctcattggactacaatggcaacccaacaggagaagaggttgaattcgctttccccgcttcttttgacgaaaaaggtaatttgacaacagaaacccaagccatttttccggctcaaaatataacggtagagctttacaaggacggcaatcttattttttctagcgaaaaagacaaaaatggagaattattcgctgcaacccccggaaaacgcaccgagatcactttcaagtactccggagaagtttcggctaatattacaattgctgactgggcaaccgttatccaacatataacaatgaattaagataccctcaatttttatatgctttggcgcacgtcacgagattagagaatttcgggcgtgcgctgtttttctctcaaaaaccgcattctccgtgataggaatacccatgatattgacacgaacaccgtcttaactttatttaaatactaacgaaaacccgcttcatcacaaggttcactccacctgttgatagttttacacactaagctgatataaataccgatcaaataaagatacaacctatgaatattatgaatatattcgcaacagacattagggtaagcatataaaaatcacagcagggtcactacataaacaagggtaactagatttaaattttatatgctaaacgcacgcttcagatgatttccgaggcgtgcgttatctatatgatagaaatacattctcctattgagacaaataccatcactcaaaacatttagacatacatatctttgtatttataaatcaagcaaagcaatttgcgaaattttaccctatgaccctgcttacatatataattacccttaaattatgatgtaggcaaacctaattaacataaccgcgaggttacataattattttgcctgaacaatcaagatcgtttacgagaaagattgttcaggtttttttatcctcccaaaagaccatctgatagcaaaagaaaaaaggacataaaaaaaggagatcgaaaaatcgacctccttttctaggtagcgagacccgggattgaaccggggacctcatgattatgaatcatgcgctctaaccagctgagctatctcgccatcattttattgtcactgtttctcttattgacggtgcaaaagtaggggttatttttgaattacacaacattttcaataaaaaaattcgcttaatttttaaggtctccacctaaacagttagttattagatacttttttcatcattaaaattagtcgttttcaaatcttttacgtatcttgcggcaaatataaggataagaacaatgaagaaagagaagtttcatatcgaatacattttcgataaagtttcacgacgaagcctgtggaatcacctaaccaccgctttgggactttccgcttggttcgccgacgaggtcattataaatgataatctctatacctttaaatggagtaaagaggcccaagaggcaacagtgatcgactccaagccggagaactttatccgttaccgctgggtagacgaggaagatgagaacgcttatttcgaatttataatccatacaatcgaattaacaggttctacggcacttgagattacggatttctccgaacccggggagaaaaaagattccattaatttatgggactcgcaagtggaagatttgaagcgaacgcttggtatttagagtagttttacagaaatctgtggggtgttatcgttttttacactacttttgccacttcaaccagattaggcaatgttgagaataaaacgattatatacatttatgctgcagacattcctgccgttgtttcttatgacattcggtatttgtctgtttattgtgttgatgcaatttctttggcgatacatcgacgatatggtgggaaaaggccttggcatccctgtattagcggagatgtttatgtatgcggctttgttccttgtcccaatggcacttcccttggctattctattagcctcattaatgacttttggaaatttaggggaacgtctggaattactggccatgaagtctgccggggtatcattgatacatatcatgcgtcctttgatcgtaacgctcctattcgtgagcgtgggagcctttttcttccaaaacaacgtaatgcccgttgtccaagtcaagctatatacattattatattccatgcgccagaaatcaccggaattggatattccggaaggttcattctacaaagatattcccggattcaatgtatatgtgaagaaaaaggacccgaaggacggtttattaaaagacgtgatgatctatgattattcggaaggattcaataacgcccgtgtaatcgtagcggactccggacggctaaagacatccgccgataaattattccttgtcctatctttattcaacggagaatctttcgagaacgtaggtaaaagccaagccaacacgacgcaagcgagaaccgccgtcccctatcgacgagaatcattcagcagcaaggatatcttgattgaattcgacgcgaatttcaaccgtaccgacgaatctttcatgcagaaccaatatatgggaaaaaacttgaaggatttacaaacctctatcgattcgatgggcatacgcttggatagcatcaaggacgtgaacgcaaaaagcatttacgatgcctcatacgtaaaaacactaaagtccttacgggctaaaaaagagagtgaagccgaggggcaaccagacgagcagcaggaaaaattgccggtaatcactcctaccatccagttggatttcgacagtctttacctagcgcaagcagcgagtagccaagccgccttattaggtcgggccaaatcctcgatcgagaatatcaagaccgactattatttccgcgcggccacggttggcgacgaggcctataaggtacgccgccacttgacggaatggcataagaaattcacggtatcgttcgcttgcatcatgttcttctttatcggagcgcccttaggagccatcatccgtaaaggagggttgggcgtgccggtcgttatctcggtaatcttgtttatcttctattatattatagataatatgggcttcaagatggcacgcgacggcgtttgggacgcatgggaaggtatgtggcttagctccgtggtcctaacacctatgggtatattcctaacctataaagcggtaaaagattctgttatcttgaatgccgacacttacgtgaatgccttgaagaacttaataggtaagcgtgaagggcgaaaagtggaacggaaagaggtgatcatatacacccccgattatgaggccaccctcccccaactggagaaattggtggaagaaagtacgacttatctgacaaaccataaacgttggatcaattatctgacattttggaaacaaggaggaaaagataacacagcggaactgttagctcaagacacggaaaatatcgtggaggaattaagtaattccgaccagaatttgctcttgaataaattgatggactacccggtcatcggaggttacaataataagctaagcaagcatataaacgggaaacttgctttggctatcggtattttcttcccactgggattgccgatctacctattggctacgtaccaacgtaaattgctacggcatgatatcgttatggtacaaaagaccagtaaggagctgatcaatatgatatattcattacatttgctaaaaaaataactcggatataaataatcaataaatatgagcgagattcaattaaacaccatcgaagaagctatcgaggatttccgtgaaggaaagttcttaatcgttgtagacgacgaggaccgggagaatgaaggagactttatcatcgcggccgagaaagtaaccccggaaaaaatcaacttcatgttgaaaaacggacgaggtgtattatgcgccccgatcacggaagaacgttgccaagagttggagctggatatgcaagttgccaataacacctctttactaggtactcctttcacgataacagtagataaattaggagggaaatgtacgaccggcgtttccatgtacgaccgtgcggaaacgatcttggcgctggctgatccaaagaccaagccatccgatctgggacgtcccggacatatcaatccgctccgtgcccgctctcgtggcgtacttcgccgtgcgggtcatacagaggctgccgtggatttggcccggttagccggtttatatcccgccggagccttgatcgagatcatcaacgaggatggaaccatggcacgtctgccgcaattaattgaggtagccaagaaattcgatatcaagattatttgcatcaaggacctgatcgcttatcgcctccggaccgaatcgatcgtagagaacggcgtagaggtagatctccctaccgagtacggacatttccgtctcattcctttccgccagaaaagcaatggattagagcatatagctttgataaagggtaaattcgaaaaagacgagcctatcttagtacgcgtgcactcatcttgcgctacaggtgatatcttcggttccatgcgttgcgagtgcggagagcaactgcacgaggctatgcgccgcatcgaccaagaaggcaaaggggttatcgtttacctgaaccaagaaggacgaggcatcggattgatggagaagatgaaagcatacaagctccaagaggatggtttggatacggtggacgcgaacttgcatttaggccatcaagcggatgagcgagattatggtgtcggagcacagatcttacgtcatatcggcgtaacgaaaatgcgcctgatgagcaataatccggtaaaacgcgtaggtctggaagcatacggacttgaggtagtagagaacgttcctatcgaggtgaaaccaaatccatacaacgaattctacatgaaaacgaagaaagaacgtatggggcatgtgctgcataacattaaatagttatcagaacgttgcaagaattccgattattgattacttttgtcgcataataataaaacaacctatacaaaaagcaatgtcatgacacaagtctcagatcgtttagcgagtttatcgccttcagcaacattggcgatgtcacaaaagagcggtgagttgaaagctcaaggtatcgatgttatcaacttaagtgtgggagaacccgatttcaatactcccgacttcattaaagaagccgcgaagaaggcgattgacgataatttctcacgttattctcccgtagcgggttatccggcattacgtaatgctatcgttgccaaattgaagaacgagaatggactggaatatacagcaggccagatctcttgtgcaaacggtgccaaacaatccgtttgtaacacggtcatggtattggtaaatccgggggacgaggttatcatccctgcccctttctgggtaagctatccggagatggtgaagttagcggaaggaactcccgttatcgttccggctggtatcgagcaagatttcaagatcactccagctcagctggaagccgctattacgcctaagacaaaagcgttaatcctttgctccccctccaacccgacgggttctgtttacagcgccgaggaattggcaggtttagcggaagtattgaaaaaacatccggatatcatcgttatagcggatgagatctacgaacatattaactatattggtaaacacaacagcatcgcttctatcgaaggaatgaaagaccgtacggttatcgtaaacggcgtttccaaagcgtatgcgatgactggctggcgtatcggtttcatcgccggaccggaatggatcgtgaaagcggttaataaattacaaggacaatatacctctggcccttgctccgtatctcaaaaagcggcggaagcggcttatacaggctcacaagaacccgttgaggaaatgcgtaaggccttcgaacgtcgtcgtgacttaatcgttaatttagcgaaagaagttccgggcttcgaggtgaataagccggaaggcgccttctacttattccccaaatgtagttattattacggcaagacagatggaacccgtgtaatcaacaacgctgatgacttagctatgtatctcttagaagtagcgcacgtagcttgcgtaggtggtacctctttcggggcacccgagtgtatccgcatgagttacgctaccagcgatgagaatatcgcagaggcgatcaaacgtattaaggatgcgttggccgcattgaaataagaaaaaattaaacagatatacttacttggcaaagtaagatatattgcattggacaagtaagtatatcttctatgggcaagtaagctatacttcataaaaaaggcgatacattgagttgtatcgcctttttctttatatcaaatacgttaccgcaattactcagcacgcaaagtgaaacgtttgaacgccaagatttgtaactcaggatcgatctccttcattgtctctcttacagtcttcttgccatccataatgtcttcttggttcaacaagcaaacctctttcaagaacttgcccagacgacccttagcgatattctcgatcatctgttgaggtaagttagccgccttctcagcggaaacagtagcaatgatttctttagccttagctacatcctctgccgtgatccaacccttatccatgttactttccatgtgagcctcgctatctacatgcgaaggattaataccagccttcttcaatgcagcctctacagccttctgcacctgctcagccttcgtcttctcgatagcaacctggatctctttctcttttacagactcaggaacaccagcctcatcaatagcaatcggattcatagcggcgatctgcataacaatattgtgagcggcttcctcagactccttgttgaaagcggcgatcgtacaaagttggttcttacccatatggttgtatacagtagtgtaagcaccttcaactacgcagtagccatccaactccattttctcgccagtgataccactacgatccgtaacagcttcttggatagtacccttgcccataggcaaagctttcacctcgtccaaagtacggcatttgttagccacggcagcgtccaagatagcttgagtcaaagccacgaagtcctcattcttagccacgaagtccgtttcgcacttcaaagcgatgatagcggcgaactcgccatccttcttagccaacacacaaccctcggcagcctcacgatcagaacgtttagcggcgatagcctgtccttttttacggataatttccattgctttctcgatgtcaccgtcagactctgtcaaagccttcttacagtccatcataccagctccactcattttgcgcagcttggtaatatcagccattgttacagccataatcttatttcctttatctttaaaatgtttatactttcaaaaattgacaatggacagttgccaattgacaaatcctgtcaaaagccaactgcccattgtatttgtattctaattgtcaattgtcaacgtcaattgtcaatcgaattattcttcgtctttcgcgaacttaccggcaacgttagcgttcaacgcatcgtcgtcttctttcttcgtacgttctttcttaacagcagcttttgccttacgctctcttttcggagcttcctcagcagcctctgcgtcaattttctcagccttacgctcttgcaagccttcgttcatagcctcgcagatagcgcccaagataacctctacagactttgtagcgtcatcgttagccgggataacgtagtcgatattgttcggattagagttcgtatcaaccataccgaatacagggatacccaaacggttagcctcgcgaacagcgatatgctctttcatcacgtctacaacgaacaacgctgacggaagacgagtaaggtctacgatagaacctaaagtcttctccaacttagcgcgttggcgagtgatttgaagtttttctctcttagaaagattatcaaatgtaccatcttttgtcatcttatcgatagtagccatcttcttgatagctttacggatcgtcgggaagttggtcaacataccacccggccagcgctcgataacgtaaggcatacctacggaagcagccttatcagcgacaacttgtttagcttgttttttggtagccacgaaaagaactttcttgccttgtttagccaagttcttcataacttcagcggcttcgtctactttagcaactgttttataaaggtcaatgatatgaataccattgcgctccatgaagatataaggagccatagcgggattccactttctttttaagtgtccgaagtgtacaccagcctctaataattgatcaaaatttactcttgacattgtttttttcttaaatcgtttactttctttgtttaatttcaaccatcaggtagtctttccgcatgtccacatgtaaaaagaatcccgataatttagatactaaacgcttcgctttacttgtaagggactcacaaataacattaacgtttactgaactggaatctcttacgagctttcggacgacccggtttcttacgctcaacagcacgaggatcgcgagttacgaatccttccgctctcaagacagccttatcttccggattaatctttatcaacgcacgagagatagccaaacgggcagcctcagactgacctttgaaaccaccaccgtcaaggttgatcttaatatcatattgctctgcgacgttcaactttgctaacggctgctttacgataaactgaaggattgaagaaggaaagtatttttccagctcacgtttgttgatcgtgatctttcccgtaccttcgctaacgaatacgcgagcgactgccgctttacgtcttcctattgcatttactacttccatcgtgattatttatatgagtttatatcgattaacttaggttgttgagcctcgtgcttgtgctcagttccctcataaacgtacatgttgttcaacaactttgcacccagacggttcttaggcaacataccttttactactttacggaacagacggtcgccacctttcttcaaaagatcagccggagtatactcgatctgtccaccgggatatccggtatatctcaaataaatacgatcgttccacttgttaccagtcagaacgactttgtctgcattgatgatgattacattatcaccacagtcaacgtgcggagtgaaattgggtttgtacttaccgcgcaaaagcttcgctactttagcgcaaaggcgacctaacgtctggccttcagcatcaacaatgacccactctttgtttacagttgccttgtttgcagaaatggtcttaaaacttaaagtatccactgcttaaaaattaaattaattaataactcaaaaaactagccttaccaacattgtcacaacggacacatgatgcaacaacgtgctaagaactaaactcttagtacaatttgataataatcggcttgcaaaggtacgggttttatccgaaataccaaacaaatctaattatttttcaagttattatgaagatactcatcacttacggaagtaataccccaaagagaatgtcacgttattttgataaacggaagtctcgccgtcacgcttcaaggcacggcggtctatcatgccgcatagggaacttacggaaaagaaaaagttactatattctaccgataggccgacgttcatgccaaaatcgcaaggtttcaaatccttctcctcggatacgccgaaatggagatccggattggtctctcggctcttcatcttgccaaacaaggaccaatcaaaggtaggaccggcgaatacggacagatgaacgtccgtgaaggtaaacgtataagccacattcacgggtatctgcaaagagtaataccaacatttattatgaagcgccatcccatgtatatcctgattcgaataataagcgccaccttggtttacgaacgccacctcaggacgaagcgaccattttttattcttactcaaaggaatatccgccaaacccgctatgctgaaaccgaagcgggctcccgcctcatacgtatcctccactttctggatcaacgaagaataagcgcctccggcacgtacgccgaaagaaacctgagccatcgccggtaaaatcatcatcacggcaatcaacaacaatccgatctttctcataaacttcctcatttgcttttccttctaatagcaagcaaagatatacatttttcaataacatctacatttatcctactgaaacatacaggaaagctacataaaaagaacaactcatgaaagggccgctcaaaagttagccccgatcgcagaaacgaccgaggctatttttttcccaccttccctcctcacggaggcaacggtggatgaactttaatttattactttagtattaatattaatccattcccgcctattcgccctcacggggtacttgaatcactacaactcccgcaggaatgattttcgatttatgttatttatcgtcattattcttatttaacgactgccttaacagcttcctcgccttctacagacaccacaacgatacctgccggagcagcgatcgtagcgttatcggaagtaagaaccgtgttagcgatagacttgccaagaacgttcgttacagaaaccatcttgccagccgcaccttggatctcgatcgtaccgttgccagcgataaccttgatgccttcggcagcatcagcgatagactcattggaagtaggatcaccagcagcgatagtgaaacgcatagcgtttttcttgttaccgctccaagacaatttatcgttgacaccatataaataagaacccttatcagctacagaacggatacgataagcgttctcgtcgtcctcacactggatgatctgaaccttgaagttgtccaagcctcctaatacaccctcatcatcagcctctttagccacggcaaccttgttacctttaacgatcgtagtcaaagtatccttactttcccaaagagtggccggcttgaagacagccttcgtgtcatcctcgttccattgatactttctgtcgtatgtaccgtctgccacatagtagtttacagagtctttcggattgaataagaacagtctgttaccatcctcaaccgtacctttgttagagatatagaaagaaggaactaccgcatccttatctgttacctgtaagtagaaagaatattgattctcgtttacaacgataccatcacgatcctcgttcatggagatatagttgttcatctcgcttatcagggaaatatgtccttcctcagcgggatagctgatttccggagcctcaacaatcaagtaagtattcaataaccaatcttgttgactactcggagttgtagcgataggccatgcataaacagaagacggagtagtatattgacattcgtcgatagaagccttataagtagcgtctactacagacgtcgtattcgcatttaaaatagaagcgatatttgagcttgtgcttgtcacctcaatcaaataaacagaaccatcagcagcttgcttaatcacaaaacgtgtagtgttattttcgccaactaattcctcttgggcagacacgttaggacttcctgccgggaagtattcctcggtttcaatgccatcattgatatactgcaatcgataaacataggcataagccttatcacctctagcttgtacagtcacacgtccatccttgttataaacaaagctacgctcgatgatcgtacgtttgttatcctctttcaccaattgccattgagcggcgccagatacctcatttgcgaacttatcattcttattcaatatatactctgaaactgcaaaaggcaaattattttcggtagctgccacataccacttattagaagtctcgttgttatcacgagcaaaagccatcgtcaccaaagtctcattgtccacgttcaagaaaccagcgtatggatcaacttctgccggagtcaattccacgattagctgttgcatatcagcatcatcgccctctgcctcacgatatgtgttctcatttacgtagatagcggtaactgttttgttatctgtagccaattcgtaaacattctcgcctaaatcagttttcgggaacaagctagcttggaaatactcgccggtctcacggttcgtgaatgtcactttatatgtatcgtctacactggaaatagcccattgataagccggagtttccaattgagaaagaaccttagctttcgcaacaaattggaacgaacctctcttaacagcattcgtcaaatactttccatatacgctcttgatgtctttcttatcgacacccttaccatctaagacacggattgtataagcagaaaccttcgcctctgtattcaacaactcaataccgctcttcatcccggcagcaccttgcttgaatataaagtagttaattgggttattgctagcatccgtcaaagtagaagtagtggccaaatagtagttgtcattgtgcttcaagatatgcaacttcaccttggcatctgcttgatccgctttgctcgcttgtttgcggtaacggaatcgatccacgttcaactcatacggatagccctcggaataactcttctgtacacggaagttagcgttgtttatggagatctcatcgccagcggctttccagttggaagaagttccttgatacaaattcaactcgctgatctttttctctaccaacatgaatccatcaccagacgcacgtcccgcatttgtaccttccactgtttcggttgagcttaaaaccaagacagttgcgtccatccaagctttataaccgctagaaacagcattagttccgctacaatcatccttatcaggtgcattctctgtaaagaagtacataccagcgggaatcttcaaatcagccgtacttcctgaataggaaggataagaagtagcgtccactctcaagtcagaaggcacataacgggcaacgattcttttctcattgaatagattaccattaggctcgctagtctgatcggagtccaatctttttgagacgaaagagaaacctgccgtgttatacaaatcattcaactcatcagctcccacagcccctaattcctctgattctaccgcatagaaagataaatcaaaagacgaagccgtagttgaaattaaagagccaccagcactccattttaactggaatacatcactcttattcccgttataagcgaatagagccttctcgcttgcagtatatttacctgttgttccgatttgagtagctccaaatgcaaaaacatctttaatcacatttccagaagccgcactattcaattctacggcctctgaaccagcagtcgtgttgacacgtagagtcttacctgtggctacattctcaaatttgtacgaataagcgcccaaattctctgttacggtaactttccagatatactgctttacatcatctttcttgtcatccgcaatagaagtagctttataatcaagaataccttcttgtaatacaccatcctcgcttacagaagtaaaaccatacgctaaaccgttggcatccgtcatcacataagctccggatttcagttccgtaacagcactacccaagcccaataaactttgaatagagttttgagcgaaggcactaccgcacagcgaccctgccacgagcagacccgccgttaacaatgtagaaatctttctgttcataatttagaatttaatattaataatagtgttaattaagcacttagctattttctgatagcagactaccgttagaaaacgactagtctaaaccatcgtttagatcttgcgtttttcgagagatacaaaggggagtttgtggaaggaagagcttgtttcgtaaaggatagcctatcctattgataagaaagcgaataaggcatgaaaaaaataacacagaagggttgcaagtgtcaaagaaatgcgtacctttgcaaatgactaattaaaacgatcgtttaaatcaatcatttttctcttctattatttaatgtacatgcgtacattagtaaatacaccatggaataatcaacaaaagtaagatcaccttttgcgatagatcggaatattagtttcccttgttctagcaaaatgacactttgtaaacagaactccctgagattcgctttttccaagcataagtacagtataaaacggcttttcacacagaaaaacgccattcataactatcttccatccgctagttcgagcacctcacgaaaacctcctgtcacgatatacggcttatatcaagcaaaatatcaatacaacatctgtttatataacatatagattctatagaatcacacatattataacctcattatatccttcagaaaacacgtacgtctttttccaaaaacatgtacgtgtttccgaaaaaagacgtacgtgtttttttaaaagcaaaacaacctctctcgtactaaaaaatatttcctacctttatgcactcatttcaatatgcaccagactatacattaatatatatggaaccgtttattcatttacacgtacatacccagtattccttgctggacggacaggcatccatcgacgcattgatcgacaaagcgtacaaagacggaatgcgtgcgatcgccgtaacagaccatggcgttatgttcggtatcaaggagtttttcaataaggttagcaaaaagaacagtaaacctctcgggatcatcaaggactccgagaaagaactaaaaccgctgctggccaaggatgcgccaaccgatgaggaacaacaaaggataacggaactacaaaaacaaatcgccgaagcgaaagcttccatcttcaagccgatcatcgggtgcgaatgttattgcgctcgcaacggaaggcatagcaagctggcctcgcaagacgaccgtagcggctggcacttgatcgttctggccaaaaataagaacggatacaagaacctgatcaagatggtatccctctcatggacggaaggattctacggacgtccgcgtattgacaaagagttgttggagaaatatcatgaggatctgatcatctgctccgcctgtttaggaggagagatcccacagcatatcatgcacggacgaatcgataaggctgaggagtctatcaaatggttcaaaaacttattcggagaagactattaccttgagatgcaacggcacgagacacacgaccccaacgccgattgcacgattttcccgcatcaacaagaggtgaacaaggtactgatcgaacttgctcacaaacataatatcaagctaatcgccaccaacgacgtccatttcgtcaatgccgacgacgctgaggcccacgaccgcctgatctgccttagtaccggcaaagacttggacgaccccaaacgtatgcgctactccaagcaagaatggatgaagacaaccgccgagatgaacaccatcttcgccgatatccccgaagctttgagtaataccctcgagatagccgacaaaatagaattctactccatcgacagcggtcctatcatgccgactttcgccattcccgaggagttcggcaccgaggagtcctaccgtcagaaattgacagagcatgatttatttgaggaattcacccgagacgagaacggtaatgtcgtattaagcgaggaagaggcgcactccaaaatcaagaaattaggtggatacgacaaactataccgcatcaagctggaagccgactatttggcgaaattgacatacgacggagccaaggagctttacggagaccccttgaacgatgaagtaaaggagcgcctgaacttcgagttacatatcatgaagaccatggggttccccggctacttcttgatcgtgcaagatttcatccgtgccgctcgtgaggaactcggtgtatccgtaggaccgggacgtggttcggccgccggatctgccgtagcttattgcttagggatcaccaagatcgacccgatcaaatatgacctcctgttcgagcgtttcttgaatccggaccgtatctccctccccgatatcgataccgacttcgatgatgatggccgtggcgaggtcttacgctgggtaacggagaaatacggtgccgagcgtgtggctcatatcattacttatggtacgatggctaccaagtccgctatcaaagatgtcgcccgggtacagaaattaccgttatccgaatcgaaccggttagccaaattggttccggataagatccctgacatgaagaagttcaaattgggcgacgccatcaagtatgtgccggaactaaaagaggcggctaacggaaatgatccgctggcacgggataccttgaaatacgcccagatgctggaaggcaacgtccgtaacacgggtgtacacgcctgcggtgtcattatcggacgttatgatatatcggatgtcgtacctgtcagtacggcgaaagacaaggataccggcgaggagatgctggttacccaatacgagggttccgtgatcgaggaaaccggattgatcaagatggacttcttgggcttgaagaccttgtccatcatcaaggaagcgatcgagaacgtgaaactgactaccggacatgatctggatatcgaccatatcagtctggaggaccccaagacttataaattgtattgcgacggaaagacaaccggtacattccagttcgagtccgccggtatgcaaaagtatttgaaggagttgcaaccttctaaattcgaggacttgatcgccatgaacgccctgtatcgcccgggcccaatggattacatcccttcttttatcgcccgtaaacagggtaaggaggagatcaagtacgatattcccgtcatggaacgctacctaaaagatacgtacggtattacggtctatcaggagcaggtcatgcttctatcccgtttgctcgctaacttcacgcgtggtgagagtgatgccttacgtaaggcgatgggtaagaagttgatcgagaagatgaaccacttgaagtctaaatttatggctggtggtcaagccaacggctataaagaggaaactttaaataagatctggtccgactgggagaagttcgcctcatacgcattcaataagagtcacgctacttgttactcatgggtggcttatcagaccgcttacttgaaagcgaacttcccgtccgagtatatggccgccgtcttgagccgaagcttatccaatatcacggatatcacgaagttcatggatgaatgtaaagcgatgggtattcaagtattgggaccggacgtgaacgagtctatcttgaagttcagcgtagataagaacaagaacatccgcttcgggctaggcgccgtgaaaggcgtaggtgagtcagccgtacaaaatatcatagaggaacgcaagaagaacggcccgtacaagagtatcttcgatttcgtagaacgggtgaacttgaccgcttgcaataagaaaaacatagagtccatggctttggccggagcgttcgataacttcggtatccagcgtgagcagttcttcaccgacagtggaaaaggggaattgttcttggataccttggttcgctatggtaacaaataccagatggataagagcacggcagtcaactctttattcggtggagacgccttgatcgccatcgctaaaccggagatcccgcaatgcgagcgttggagcgatctcgaacgcctaaataaagagaaggagttggtcggtatttacctatccgcccacccgttggatgaataccgtatcatattaaagtatgtatgtaataccggcatggtagaacttaacgagcgggaaaccttacaaggccgggaggttttattaggtggtatcgtcaccggtttccgggaaggaatgaccaagaacggaaagccttacggaatcttgaagatcgaggatttcacgggtagtggcgagatccctcttttcggacaggattatatcgaatacagcaagtatggtaaaatagggatgtatctcttgatcacagcccgtgtagagcctagccgctgggaccccaataaactggacttcaagattggtaccgtcaaccttttgcaagacgagaaagacaagctgatcgagaaaatcagtatcacggtcccgatccatgatttggacgagccgacaatcaatgagctttcggtattgatcaagaacaatccgggccatagcctgttatattttaaggttgtcgatggggaacataatatttccctaaatctcttctcccaaaatatccgcttaaacgtgacccgtgagctggtagactttttacaggagaacgagaatatcgattttaaaattaatggttaaagttgtacgacgctgaaagaatttgtacttttggcgtcataacaatcattagattataattcataattaaataatacgtaattcaaaatggcactacaaattacagacgctaatttcgaggagttggttaactccggaaagcccatggttcttgacttttgggcagagtggtgtggcccttgccgcatggtatctcctatcattgatgagttggcaaccgaatacgaaggtcgtgtgacgatcggtaaaatgaacgttgacgagaatgacgatgtagtcggacaattcggtatccgcaacatccctaccgttcttttcttcaaagacggtaagatggttgataaagtagtaggcgctacggctaaggataagttcgtagaaaagatcgaggcaatgcttaaataattgaaagttgagaattgagaattgaaaataccgaggaatacgctctgtaactttcaattctcaatttttaatacccctaagtatatgtcgcttgcccggaggaccgggaagacggctcatctcaaaaccagccgcttgcatacctctgcgtacctctccttttgcgcaataggttacgatcactccgcccggtgcggtatgagcatacaaacgattatagatttcctgattccacatctccggttgtttctcgggcgcaaatgcgtcgaaatagatcaaatcgatatcatccggtagttcacaggcgttactatttccttctattttatgaagtgtaaagcgctctgagattgaaacgggagtattccactccgcctcatgcaaggctaagaataactcttttctctccggccagatcagctctccataattcaaggtacgaatcgtatctaaaggaagcgggtataactccacggtataataatcaatatgatgtgcttgagatagctcgacatccttaaatgtcaaaaaggcgttcagccctgtaccgaagccaacttccacgattcggataaagtctttctcccgcgcatgcaatcccgcctcaataaatatatgtctcgattcctgcaacgccccgttcacggaatgataatgttcatccatcgccggaatatatagcgtatggcttccatccgccgttatctgtaattctttctccatatgtatgcaaagataatacatacgaatcagaataatacttatctttaccgctataaatatgatataagatatggatagacgccatctttacttcttactattcttattatgtaccatacaagccgctatcggtcaacagcgctccttctctatcaagggagttgtaaaagacgcatcgagcggacagccgatacctttcgctaacgtagtggtatggaacacgacgcaaggggcggtcaccgattccaccggattattcgagatatccggcatatcacccggaagctatcgtctccaatcctcctttctgggatataagccattcgttaccgccgaattcagactagcgaataaagatatattcttcccgatcgagctagaggaagccagccagaatctgcaagaggttagcgtagtagcctctccgttccgtaaaaccgccgaaagtccgctaggacttcgtgtaatcggtttcaaggagatagagaaaagtgcgggaggaaaccgggatatctcccgggtagtacaaacctttccgggagtagcgtctacggcagcgtttcgtaacgacttgatggtaagaggaggaggtccctcggaaaaccgtttctttttggatggcgtagagataccgaatatcaaccatttctctacccaaggagcctccggaggtccggtcggtattatcaatcccgattttatccgggaggtcaacttttattcggccgcattccccgcatccaaagggaacactttaagttcggtattggattttaaactacaagatgggaataaggagaaattctcattgcgaggagtcctaggagcctcagatatcggtgtgtccgctaatggaccgctaggaaaaaagaccacttaccaagtgtctgttcgtcgctcttaccttcaattccttttcgatatgatcggcttgccgttcttacctactttcacggatgcccaattcaagattaagcactccttcaaccccaagaatgagcttacagttctcggattaggggcgatcgatgatatgaagctgaatacaggaatggaagacatgagcgagaaaaaccaatatatcctctcttacttgccggtcgtaaaacaaaaaacgtatacccttggagcggtttataaacactacgccggtaaaaatctctactcggtcattatcagccgtagccagaccaacaataagaatattaaatacaaagacaatgacgaaagcaaggaagagaatctctccttaaattaccgttcggatgagatcgagaataagttccgaacggaaaacacgttccgcttaccattcattcaattgaatgtcggaggaaacatcgaatacgcccaatacacgaatgacacctatcaaaagcaatttacctctatcccccgtaccatcgtatatcaaacagaccttggcatatggaagtggggtatctatgccacggctatttatgagagttataacgagcggtttaccgcctctttaggtgttcgtgcggacgcaaacaattattcctcggatatgaataatttgttagatcagttatctcctcgcctatccttatcctaccgcttgtccgatccgctttatataaacgcgaatatcggacgctactacgagcttcctccttatacgacattgggattcaaggataatgaaggtaattatgtaaaccggacaaatcatttaagctatatccgaagcgaccaagccggattaggcttggaataccgtcctacctcatacttgaaattcacggccgaaggattctataaacattatgatcgttatccgatgtccatactcgacagtatcccactcgcgtcgaaaggtacagactatggtgtcttgggaaatgaggccgtatcgtctaccgctacagggcgagcttatgggcttgagatcatgggacgttggtataattataaagggcttactttcatcgcatcctacactttggtaagaagcgaattcaaggatgggagaaatatggacacttatcttccctcggcttgggacaataagcatctgttcacgtttagcgggacttattctttacccaagaactgggacgtaggcgccaagttccgggtagtaggaggcgctccctatacgccttacgatgtagaaaagagtagttatgtagaagcttgggacgctaataacgggctatactatgattacagccggtttaacagcgaacggctcaagccattcacgcagttagatatccgtatcgataaaacattttacttcaaaaagatcatgcttggagcctatatcgacatccaaaacatattgaattccaaatacaaagagcaagacgtatatatcaaaacgggtaaaattatcaacccggaagctcccatatatgaacaacggtacgaattaagaccgatagaacgtcttacaggaacgcttctcccaagtatcggagtgatgatcgagttatagattttaggcgtaatagattctttttattttgaatttcagcaattaatcataaatcttttctatttttgtggactgtatgaacaaaaaatagtactttaatcgcaaataagcacatgaataggtaggtaaagaatgacattattaaaatactacatacgattcgtactctttatcgtgttaagtctggtcttttctttccacttatacgctacagataatgcaggccctattttaatcattagctcctacaatcccgatacacgtaatacgaccgccaatatttccgagtttatggaggaatataagcggggaggtggtatctcgccggtggttatcgagaacatgaactgtaagagcctcccggaagcccccttatgggacggtaagatgagaggtatattggataaatataaggaaaataacacccctcagcttatcattatcttaggtcaagaggcatgggcttcttatatctcccaagaatacaagcctaatataccggttttatgcggtatgatcagtaagaatgcgatcttattacccgactcggatttaaatgtcgccgaatgggaaccgaaatacatcgatatccaagagtacgtagataaaggtttacaccttggcgggttcttgtattcttatgacgtaaaagaaaatatccggttaatacgtaagctatatccccaaactcaaaatatagcattaatcaccgataatacctacggtggtttagctatgcagaccttggtaaaaaaggaaatggaaaatatcaaggatctgaacttgatattactggatggaagaaagaataatatctacaccattgttgagcaaatcaagaacctgccggatcagaccgtgatattgattggtacatggcgtgtagacgtgaacgacgggtattatgttggaaatgccacgtataccatgatgaccgccaatcccagaatcccgacattcacattggcatccgtcggcatagggcactgggccatcggaggtttcagtcccaaatacaggcctataggttccgatttggcgaaagaggctttaagtatattggagaagaaaatcgcccctaaagatatccatccacaaatcattcccaatggatatatgttcgacgcttcaaagatcaaggcttttgatatcagcagattgtcattgccccacgacgctactattatcaacgaggacccgagcctattctccaaatacaggttcgagatcttgctaagcgtaatcaccgtattgtttattttcctgattatgatattaatcttctttatccggaccaataaactgaaagataagttattggatctacagaaagataatatactaatcatgaataatatccaagcttccatctatttcatcaagccggattataccgtaaaatggagaaatgaggtagagttccatgactgtatccctgaattcggtccggctaattgcttcttggtcaagaacggagtaaagccttattgtacccgttgcacggtcgcaaaggccatggaaaccaaaaagcaggtcgatatcacgaatgagttcggcgatggaaagtatcttcatattttggcgaaccctgtattagacgagcacgacaaccttatcggggttattttcaagaaagaagatgtgacaaaacaaaaacaggcggagaacgaactgaggaaagcgaaagagaaagcggaagagtccgatcgtttgaaatctgcgttcttggcgaatatgagtcatgagattcgaacgccattgaatgcgatcgtcggtttctccggattattggccgtaaccgagaatatggaggataaagaggaatatatcaatatcattaatagcaacaacgacctgctattgcaattgatcaatgatattctcgatctagccaagatagaggcgggtacgctagaattcgtggattcagacgtagatgtcaatcaactattctccgatatcgagcagtcttcccgtttgaaggcgcaagatggtgtgcaggtatgctttgtcgagaagatcccgaattgtatcttacgcaccgaccgtaaccgggtctcccaagtcattacgaactttatcaacaatgccatcaagttcacgactcaaggtagcatcctgtttggctaccgccatagagatgatgagttgtatttctatgtaaaagatacgggatgcggtatcgctaaggataagatcggtcaagttttcacccgtttcgttaagttaaatagctttgtgcaaggaacggggctgggattatcgatttgccagatgattatcaagcgtctgggtggagatataggggtggaatcagagcaaggaaaaggttctacattctggtttacgttgccctattcgatactagagatgcaggaagtcccgcatgagaaaccaaagaccgagaatgtacagaagagccagtcatccaaatcggcaaccctattaatagcggaagataacgaaagcaactatactttattccaagccatgttgaaagattataaccttatacacgcatggaacggggaacaagcgatcgatttattcaataaatatcaaccggacttaatcctaatggacctaaaaatgccgatcgtagacggctatgaggctacacgggtaattcgggaaaagagccagtccatccctatcatcgccgtaacggctttcgctttcgcggaggatgaggaacgggtaaaacaaagtggattctcctcttacatcgctaaaccgatcaagccggataagctaatcgcatgtattaatacttatttatagaatccgtttggtaacaatcggaaaacgcaagacgaaagaggaacccttctctacttgagagtcgagactaatacttcctccatgacggttcatgatctgccggcaaagacttaatccgatgccggaacctttagatttagtcgtgaagaaaggcacgaagaccttgtcgatcgcctcgggaacaattccgctaccattatcaatcaccgaaataataaccatgccggctttttggacagcctccacgactatttgaggagataaggactcttcacaagcctctatcgcatttttcaatagattaattaatacttgttccaccatgatccgatccgcatataaattcaaatcttccggttttacacgaaagaagaggatgtcggacttctccggaaatagaagccggatatcgtcaaagagagccgaaaccgagaagtttcgtaaagtaggtaaaggcagacgggttaattgccgataattctcgacaaaatccaatagccccttacttctccggtggatcgtttgcatggcttgtaccatgatagcgtagtctctctcattcatgccatttatcgtcgcacgctcggctactgtctctgataaagagattaccggagcgatcgagttcatgatctcatgcgtcaatacccggataagtttctgccatgcctcggtttccgcctcagcgaccaccgaattatacaatcgactccgtaaagcctccaaggcagcgttcatagaagaggccaaagccttttcgtcttccgtcattgaatcggaaggataaaacaggctcagatccccgtaatgaatactctctatcaggtattccatccgcttaacagtcttttgctgatccttatataagaaaaccgaaagcgcaagaatacaaaatccgaacagcgcgggaataaacaaaaaccctttcagcattaagaatgaggcagtaaaagacaagaccacgatccccaaaatacgagcgaacaacaagtaacgtatcataagccaaatttctccaatttacgatacaaggtaaagcgggtaatccctagaagctcggcggcacgagtgatattcccctcggcacgacgtaaggcacgttcaatcgcttctttctccaataccgtcaaatttaactcatcggatggttccttatccctaagcgggacagaacgcagaataaagtcttccggccttagccaattactttcagacaagataaccgcccgttcaatcgcatgttgcagttcacgtacattaccgggccaagcataattatgtagcttattcttcccatccctgttaatgcccttcaagtctttcttatatttacgggcatacttcgacaagaaatgttcagccaataagatcacgtcatttcctcgttccctcaagggaggaatatgtaactcgatcgtattaatacgatataaaagatcttgccggaaagtaccttctgccacgagatgatggatattcgcgttcgttgcgcagatcaaccggatatcaatcggtatgggttgcgttgctcccaagcgggttatctgtcgtttttccaaagcggtcaacagtttcgcttgcatggaaaggcttaagttcccgatctcatccaagaacaaggtaccaccggaagctacctccattcgtcccggcttttccttacgggcatccgtaaaagcccctttctcatagccgaataattcactctcgaaaagttgttccggaatagagcccacatcgatcccgacgaaaagattctccgaacgcggagattgatgatataaggcgcgggcaactaaatctttaccggttccattctcccccaagattaatatattggcatccgtattctttaatttatcgaccgtagcgaaaatagcctgcatcggttcgctttcaccgatgatctcgaagccagcatcctcgggtgaactaagaatctcaacttgtttctttaaatttcgcacttccgccctactctcccgaagttccaatgccgaagagagtgtagcgagtaatttctccttttcccaaggtttcgggataaagtcggtagctcctgccttaatcgcccgcacggccttatccgtatccgaataggcagtcataaaaagaaccaccacgtccgggtctatcttctttatcttctccagccaatagaaaccctcctgaccactaatagcatcccgtttgaaattcatatccaacaagataatatccgggataaaagtccgcatgaaatgatcgatgcgctccggttgcgtagccactcttatttgttccatatagggctccagtaataagttaagggcaaaaaggatgtcctcattatcatctataattaatagttttccctttttcataagcgctgaactagtttgtgatgcctcaaaggtaggtattaaatcaatggaagaagcgtgcgtaatcgaacgattatcgtgcacagatgaactgttaaattaatagtccgcaaagagggttaagattaagtaaacggtaagactatttaagcgaaagaaaaaacgaggagaaagaaggaagactatctttgaacacaattaacaattcaggcattcatgagaccactattgattggatttttcgtctgtataaatatacacttaggctatgcgcaatggactgagcaagattcgatctggctaaaggatgtattagcaggcaaagattccatcaaattgaaccctgaattccaaaaagcaatccaaagcggttctttcctcaacccggaaccgggaaaaccgatggggaaacctcaactggccgctcccagcaatatccctatcaccaaagatttctcagaatatatccaacaagacgatacgacacaccgaaaagtagcattgaaggatttaccgccatcggtattctggcgacataatccaccgtataaaaagatactgcctgtctatcaatctatcttagatgaattgaaaaagactccgtccagtggtcgtacctcactagctaccttcgatctaggaaggatgaccagccggaaaacatatgtccataaacgcaacgcaaaacgcaacggaacttggcaaaactacggtaacctccctaccccggatgtcatctctaaaaggaagaaattcgaaagacaacaggcagaggccgcaaaaaaggactcctcattgatgatccaaccaccaatcgattagcttacgggccaagctcaacttacgggggatctccggtaggttatctttggtatagaaggcaccagagcttagttcctcatcctgcaacttaatttccccacttacataatccgcaataaagccaaccatcaagccactcggataaggccagggttggtttccgaaataagtgatattatcgacctctaaacccgtttcctcacggacctcccggcgcacacactcttccaaggtctcgccaacttctaagaatccggccactaatccatggaaagttccccggaaattacgggcatgtaccaaaagaatcgaatcctccttacggatcaagacgatcatcgctgctgagattgtcggataaatctcatgtttgcaagaaggacattgcttcatgatcgacgtagtctgtacggtaggagtaccacataccgggcagaaacggctatggctatcccaataaagcaattgaaaagccttacccgccttctcgtaacacgctctcgagatataatcccaagaggcacgcaaccccatatgtacgtaacggtcattcccctccaccggagtatctaattctgccgtacgcgcgggaagtccatcccggtaatcaacctccagcgtatgagaaaccggaactgggggattctcgccataagggatggtatacgtatcattctctttctgaagcaacagttggtctttataaaaaaggaaccaataacagagtctatttgaagtttccatgctgatatttccgaattatctttctgtatttaaaacatccgcaaacttacgaattaaaatcaaataacgtgcgaaagcgaacgtgcaccgtgcgaaggcacacacaatcgtttctaagcatttttctattatcttatgattagcagaacgttacatcgatggcacattatttgcctcttttctaaaaaatgaatatatttaaaacctgttacaatgaaactaatgattcgaaacttactttatctattcaagcggtttaagaccgccgtcgtgttaaacctcttcggcttgacaatcgctttcgccgccttcctcctgatagtaatgcaggtggattacgagatgaattacgatgccatgcacagtaaatcgggccgaaccttccggctagaggcaaatcacggagaattcgagcataacgccatccattgcctaatgtttagcgatgcttttgttaactcatccgctcatatcacggattactcctaccgttatccattctacggaggagaacggtattgccaaatcgacgaggtagacgatcaaggagaagcgaaagtcttcaaggaaaacttccagctttgtctacccaatatctcagatgtctttgatttccacatgaaagaaggttccgtcgaatgcctatccattcccggttccgtactcattccggagagtgtcgccaaaaggctgttcgacaaacaatccgctatcggtaaacgtatccggatgtccggcagtagtggctggcaacctgtaagtaccacgatacttactattgggggtgtctataaggatttcccgggaaatactacggtacaaaaccgtatttacgtcccgatggaccaactggatctattaaaaagttcttggcaaatgtatgccaacgaaatatacgtcacgctagacgatcccctaaataaagaggaggtattggatcatttcaacaagactttcgatttcgctaaaagccaaatgggttcagcgcaagagatcgcattacgtctaacccccttaaaggatgtttattacacgcatgatacaactttcgactttaatccgaaaggtcaccgggagacaaattatgtgttactgggtatcgctttcctcatcttattcatcgccggaatcaattttaccaatctcacaacctcgttgattcccctacgattgaaaacgatcaatacgcaccgggtattaggatgctccatctataagttacgagccatctcactgattgaatcgatcgtgatctgcttgatatcctacattctcgccttattcatcgtaaacgatttgtcttacacaccgatcgctaattgggtagatgcggatatacgtcttagtcaatacaaaggcctgatccttctcacagcactgatcgctatcttgacgggttgcttggcgggactttatccagctatacgaagtacctcctatgcgccggccttggtactaaagggctctttcggtcttagtcccaaagggaaaaaagtacgtgtcgccctgatcggtttccaatacacggtatcgatcgccttgattattgtcaccttattcatgggacttcagaaccatttcatgacctctagcgagcaactaggattcaataaagaccaagtagccatcgtgaacctgacaccggagatctacgccaagcataagccccaatatatccagaaacttaaagattatccgggaatagaggatgtggccttctccgtctacgagttatcgaaagaagatgacatgatcgatctcgaatatgcccgccatgaagataaggatgtattcttcaaggtattctatgcctccgagaatttcctttccgtcatggatatccaagtagaggaaggaagggattttacacgggaggatttaaacaaggcacaaagtgattatatcatcaatccggcggcagagcgggatttccacttacatcccggagatcgtttcaatgatcgtacggttctaggagtcagcaaggatttccggtttaactcttgccggatcgcaagctcgcctttcgtattcgcattgaataacgatatacccaatcctaaattggtatcctatatccgcttcaattcgaaaacgaatttacaggaagctgtcgcccacgtccgggaaacattgaaagagatcgatccgactttccctttcgagatctctttctacaacaccatcttaaataatttatatcagaaagaacaaacactgggtaaactaatctccctattcggaataatggcgatcttgatctctatcgtaggtgtattcggactcgtgctatttgagacgcaataccgccggaaagagatcggtatccgcaagatcaacggagcgactactggacagattcttttgatgttcaacaagacttatatccggattgtctccgtttgcttcatcatctcgattccgatagcatggatgggaacacaacagtggctagagaatttcgcttataaaacaccactccatctttgggtcttcatcgtagctttcctaatcattctctcggttacgatcggtaccgttactttccggaactggcaagcggcgaatgagaatcctgtgaactcggtgaagtctgaataaactcactcggagtgatcccgtaaatttctttaaagcaacgggtaaaatagttcggatcggagaagccgacctgagcagctacctccccgatcgaataagcgtgctgccccaataactcggcggcacgctttatacgtatattacgggtgaatgaggaagcggagcaaccggtagtagactttaatttccgaaataagctggcacggctcatcgccatctcggaacagaaaagctctacatcaaactccgggtcctgcaaatgagccagaacgacccttgtcactttcgaaacaaattccttatcaggattggcaactgtttgctccggggtacgcagatcgaaccgatccctgaaatataactttagtcgctcactacgtttgagcagattcttgatcttcgcttttaagacagcaagactgaacggtttaggcagataatcatccgctccggctccatacccttccaattgttgacgttcttccgctaaagcagtcaataggataaccggtatatgggccgtccgttcatccgttttcaaagcctcgcaacattcaatcccattcatgaccggcatcattacatccgagacaatcacgtccggtaggatctccatggctttctccaagccgacctttccgtttttcgctatcacgacccggtaatccgtttgaaaagcattcatcaaataacgacatagatcctcattatcctctacaaacaaaagcgtttgtcgtagattctccgggaccgggtttgttccttccaatggaactgattcccgcaaagatgcctcttccattttaggttccgaatactccaaccactcctcaggataagcctcttccgatataggcaaggcaaccgtaaaaacagaacctttccccaattcactctcacattgaatggttgccttatgtaactccaatagctcttttgtgtacgcaaggccgatccccgaactctccgagcggcgaaacgctatcgattcccccttataatattgatcaaaaatatacggtaacgattcggggggaatgccgattccactatccgtaattcgtaaagtcatgaccgcatcggatgagctttgctccaataaagcggaaaagcttaccgaaccaccatccggcgtatacttaaatgcgttcgacagtaaattatatagaacctgctctaggatattcttgtcaaaataagcgattgagatatccggggcaatcgaatacgtaaacgcaattttataggaatcggccaaaggaataaaggtttccgaaatctcctttaagaatcgactgagatccgcacaaacaatatgcggggaaggaactccccgggtcaataccgataaatccagtaattcattgacatgccgaatcaagcgattggtattccgggagatcgtacgcaaagtttctttatctccacaagattcttctgaaccggaatgccgttccagatcctccgtcaatcccttgattatcgtcagcggggtacgaagctcatgagagacattcataaagaaacgagttttcaacgcatctttttcctccagttcttgcttggcctgtttcaacagccgtgtacgttcttgtatcttacgctccaactcggcttggcgaagctgataccagcgcacccggctcttataggcgatatacaacagtacgcatacaaccacgaataccagcaaaataaaccaccacgtccgccaccaaggaggaaagatcctgacaggttcggtaatgggagcgctccaataggaaccattgccggaagtttccacccgaaacacatagtttcccggtggtaggcggttatatatagccgtacgatcgctggcgtccacctcccgccaatccgtatcatatccatccagacgataccggtatcggatactacggggatgagaataatcgaacgcgataaaacccacctgtaaaccttgcttctcacgtgagtctccgatcgtgaggttcgtgattcgcagagactcaggtatttttctcaaaccgtccgttaactgaacgggatcaaaagaaacgatcccctcattactgccaaatacaagttcacccgatttgcgcttacagcaagcgccacccataaactcattcgataataaaccgtttgccgtcgtataattaacgatatgccggttttgtatatccaagcgactcagccctttattcgtgctgacaaacaggatgcccggctcaccttcacggattcctcgtacgatatttcccgataagccatcctgtaccgtgaaatgatcaaatcgcccggttcgcttgtcgtattgatccaaccccgcattcgtaccgatccacaaataaccggaagagtccacaaacagacaatgaatatgattcgacgcaaggggattcatctcacccggtatatatcgatacgtgataagctctctcgtcttcgtatcccacacccgaagccgcccctcatccgctcctccccaaaaccaagactcttcgctcacgcataagttacataactccgacaacgagttgatcggataatcataagagacttggtaatccggtataaaagggcggattcggaaatcatccagattcaaccggtccgggttggcgtcttgataactgatccataggttccgctccgaatcctcacggatagaacctataatctttccggataaagaggacggactttttcggggtgagaaggtaaaacgcatatctacccgggaagtcttatggttaatccgatctaatcccctagaggtcgcaacccaaagattcaggtccgaatcctcataaacggctaggatatgaagagaagacagattctctttttccgtgtatcccaaggtatatcgaaacaaggaaggtgttaaatccgcatggctcactccatacgtggaatgtcccgcccacagatgatccgagtcatccagaaacaaacaggtaatctggttactgctgatagaatgtgcgtcttccggcacgttcctcaactgtcccattttcctctccttcggagaataataaaaaagaccttgattgaaacggctatcatcaaaccagaccgttccatccttactctcgaagatggatcgcacttggcattctcccgtaggttccagatcctccggccggtcaaagaaatgctcacatcgcaaggcaagccggttcatccggctaatcaagcttgcccccttattatgtccgatccagaaatcaccatcaccggtctccaagaattgatatacccgagtatcctcacgcccgacagattgaaagatttctcgctctcccatatcaaccgaacgaaaagccccttcacgtcccgtacctaaccacatataatcaaaccggtcgatatagatcgcgttaacgccattcaaattgccggcattgatatcctcccggtcatttgtccgtatcgtataatcttgaaagtggtttgtttctttgtcatacaaactaaaacctgctaaagtccctacccaaaacgaatgatccggcgccgaatacaaacaattcacaggagacgacgagactaccgaacccgccgaagaaaggcgtaccaatttcttctctttagcgtcatactccaacatcccgttctccgtacctataaagatatgtcccggaacggaggccgagaaacaagtaggactaccatacacacgtaactgttgtcgaagccattctttcgtgaaattcaaaaatgtatccgaacctctgtcataacggctaatcccacccgaggaaaaaaagatccagatacctccatctgaatcctcgaataatttatcgatagaactgctttgtatactttccgggcaatccggtacgggcaagaatactttaaacgtatatccatcgtagcggttcaagccttcagtcgtcccgacccagacatacccggtacgatccttcaaaatagaggtcaccgaggaagaagaaagcccgctatccattgttatccggtcaaaaataacgttggtagcttgcgttctcgttaccataagtacaaacagcagtaaaaggtatattctcatccattcatccgattaatgccccaaatataaagattaagtgggtgaaaatcacagaaaatagaaagattgaacgatttgtacggtattatgaaacatatgtccggcccgctccctccctatttccctagctttgcggtatcaattctaaaacgaatgtaaaatatgagaaaactttttctatcgctagtattccttagcgcactactatctatccatgcgaatccgggtattaaaggaatcgtaatcgatcaaaccacccgtaaggcattagactacgctcacgttgtattatatgatggagatcatatcgtcgaagaagctatgactgaagcgaacggttcttttctaatccagcccgtaaaaccgggaacgtattcgatccgtatccattttctgggatatgatgtttatatgggagaggagtttatccttacagagcagatcaaggatctgggtattatcccgatgcaaatgcttgaggtaggcttacaggaagtggaggtcgtagccaacaagaaacaagtcatctataaactggataaaaagatcatcgaggcttcttccaacctgctttcctcgggaggaaccgctgtcgatatcctagagaacacgccttccatccgggtgaacgccgagggagaggttaccttccgggggagtagcggattcacagtctacgtagatggaaagcccagtatatttaccgggacccaagccttggaacagatcccgtccggacaaatccagaatatagagatcataactaccccgtccgcccaacatgatacagggggtgatgtcgggatcatcaatgtcattaccaagaagaacttcggggaagggttgagcggagtaatcaacctaagcgggaatacggtatggagccggaccttggatttcttgttgaccggacaaaacaaggtgtctcaatggcgtataggcggttatgtgggaaaccgacttcgcaaaagtcattttacccaagagaaaacgacgttggtaaacgatacgacaacgacttcttattccaatggcccccgtgaaagtaacggctacgcatatattctcaatggaggttggagctatacacaaaaacaaacgactttttccattaacgcggaaggcggatatgccggactcaagcgaaaaggggatctggaatatacggaagaacgttccgctaatggcgagcaattcgagaacggagagttcaagagccttgacgactttgatatccatgagactttcggactagggaatctggccgtggatcataagttcaatgataaggggcataaccttagcggtagcttcttcttgaaatatggaggcgacgctctggaatatttccaaagcgatctgttcgacaaaaacaacgtacgccagcaaggtcatcgtgcgtgggaggccgaacatcgttggaccgtccgtgcgaaagccgattatgtatttccatacagcaaaaccggacaaatcaaggcgggttatcaatatttctcatactcggaagacggcgattatagtatgcagttttggaacccggataccaaagagttcttctggcgtgacgatatttacaacacgttctatttccaacaagggatcaactccctttatgcgatcgttggggatagctaccggtcttttgattttcaagtaggattacggggagaacatacgcatcaagtattacgtagctccaaagattgggcgaaccgcctacaaaagcgttttgagttgttcccatccgcccatatcggttataacctcacacaaaatcagaagcttctattcgcttacagccgtcgtacgacccgaccggagctttatttcatggagccatacatcacttacaaggattactatacagccgagatcggtaacccggatatacgcccggagtacattcattctttcgagttgaattattctttgacttccggcgacaatgccttgtctgcctccctattccaccgaacccgcaaagacaagatcgaacgattacgggttccttaccaagccggggttaccttggattccatggcgaacgtgggacatgattattccaccggaatagaactatcgggcagtttgcaggccaccagttggtggaatacgcaaataaacggtagcctttatcactaccgggtagagaacgagtataagacggacggaaagaatgagaccagtaccaattacgagatcgcttggaacaacgctttcacggccgggaaatacacaaggatacagcttgacggcaatttcgtaggtccttccgtaaccacccaaggaagaacccagtcgttctgttttgtcaacctagcgatacggcaacaattcttcaaacgaaagttgacggccaccctctctttccgggatgtcttcaatacggcccgttatgtcaatacgatcacttcctcgaacttgatttccaaaacacgaatccggcccgattacccgttgataggcttgacccttagctatacattcaaccagttcaagctaaagaatggcttatccaacaattcaaaggatttattcgaggggacgaatcattagtacaaatcatactatcgcaaaatcctatataatggaacatctgagatgttttaactatttgtccttgcaactgttattatcatctcctacttttgcgataggaaatatgactgtgaagatttccatatagtgaggactgagccgaaaaagtaagccccgatcgaacaaacgaccggggctgattcttttcccgctttccttcctcacggaagtactaagggatgaactttaatttattactttagtattaatattaatccattcccgcttgttcgccctcacgggatacttggataatccgcacggggatgattttcgatttatttttcattattcctttacatgtcttatttaacgaccacctttacagtctcgtcgccaaccgttacaagaacgattcctgcgggaacagcgatcgtagcgttatcggaagtaaccactgtctcagccaatggcatacccaacaggttacgaacataagccgtctcgccttgagcgccttggatcgttacggaaccggcgttgccgatcactacgatagaagaggcggagctgtcgatagactcgttaccggtcgggatgataccgttctcaacgcttacgaccaaagcctctgatttatcgttcgtgaatccaagtttaccgttcaagttgaagatatagtttgaactagataaactcttgatgatatactcaccttctacagtagcatctttcaatacgatctggaacttaaagttgttcaagccattcttagcggtcacctctgtttccttaccttttacagtagtagacaaagtatcgatacctaccaaagtagccgggcggaaaatagccttgatagaggtgcgatccaccaacttatagctatcgtctgttactaggctagcagaacccgggttgtaataagaagcggaatccttagcgttatacaagaacattctcggagcgttggctgtcgtatcaacacccttagagatatagaatgaaggagtataagctttcgtatcagcagtatccaaccagaatgtcaagttctccgcatctgcgcttgtcggagcgataacagcgtcgttagcctcgcctacagccacgaaaccaccttccaatgcttggaaagaagcatgtctaagaacagaaggcaaggaaggagtcgtgatatctctcactacgaagaaactagcttttacgtcttttgctgtcgcataaatactttcctgcgtcaacttgccatccgtactactcaaagccaaaccttgcgtattcttattaatgatctctgtgtatttacgttctgtaccagccttaattaaataagcggaaccgttcttgttctccttcacgataaatctaggagcgtcttccacgtcatcttcttgaataagtgaatagcttccacgagtttcattcaaatagaaagccttaccgtccatatgcaatttgaatgcgtaagatacgatagcgatatctttcacgtctttcgtcttagtctcttcgtcttttacgatataagcgtattttgtagatccatagatcgtatcggatttagccacgtcgctttcagcggcactgcaatcgaacttgatgatttcccattcagcggcatccaacgcttcttgagtagcctctacagaagaaggagtagagcctgtatatttagctttcaagtacaaatccttataaagaacattcgatccaaccgtaaatttcagtctagctaactcagcaagctcagcgtctgaataatcagcgtaacctgcggaaggagttaccgtagcagggatcaatttgatcttcaagccatctactgttgccaaatctttgtcattagaaatcgtatatgagttatttgcaacataagcataagtgaatgtcttagactccgcatttacttcgtaaacattagcctcatcggtcttacgtaaagaagccgtgaatgaaaggcctgtggcagcacccgtagaagtattataggtatttacctcacggttcgtgaacgtgaacttctgcccgtcaatcttagttactacccactgattctgcggagcgttcaagtttacataatccgggccttgagcgaacaactcataatcgctcgttcctacttttaaacctaagtacttaccgtattcggaagaaccggatttagtcacattcttctcattgcttacgaacaatacattaaatacggacggcgcatccttactcaacaattcagaagctttcagcatattggaagtgctaatcgtacattttgcggtagtcggcttgctagtcgttgttacataagtagtgcctgtagaggtaatagcgtctacataaacatcaggaactgtagtttgatcgtctttagccgcatctttcttcacacgtacggaagacagtttcaatgtatattcacccggtttgtttacgttatccatctctgataccgtaaacgcagcgttaccggcgtaaacttgctccttagacgtgtttgcagtcattaccaaattctctccggataccaacttgaaagcgaaaccaacgccatccgctctcttcagcgcattgataccaaaatggtttaccgggtctacagcgataaaggtagaagccttgaaagttgcctcatctacaataccacctttcggagcagatacggcgaaataagttcctgacggtaaagacaagtttgtagcccaagtctctccagcaaagttataagccctaatcttctgatcgaagatattctccttcggctgtggattaatcgccggaaaactcaaagcgaaaccattacctaaagccgcatttaagtcatcaacagaaacaggagctgcatcctgtacgaaaacttgaatatttactccgctagagttcattgaccaagttgtacccgaaagcccgatttggtgagaagcgtcaacggcttggatagccttacctgcttgaatatacttgtttgcgtccaaccatgtcaactcattagccttgcctgcatccaccgtcgtagtgattgtaccatccgtggcaaaagacaataaagtacctgtttccttgttcttaaacgtaaaataggatttaccattacgagttacatgagaaatagcccataaatacgcaccatcgccactaactacatccttatcagtttccgccgtagtattcaatgcggtgtattgctccgcagtaccttttttcacgctctgtccaccaatgtagctgtaagttccgccattctcattcgcaagataataatacttgctgccattgaattgggtatctgccgcttctttggttgtttgagcattcgcagtagtaaacaatgcacctgcggtcagcaagcccattgtcatcaacgtagaaattctcttgttcataatctctaatttaaatattaataatagtgttaattaaatatcattcaacatattaaccgatcacctcctattcgaaaacgactagtctaaacgatcgtttagatcttgcgtttttaaagaagaaaaacgggaggttcgtttacggaatcggttgtttcgtaaaggataggctatcctattgataagaaagcgaataagggaacaaaaaaatagctcggaagggttgcagaagtcaaagaaacgcgtacctttgcaaatgactaattataacgatcgttttcaccaatcattttcatatatataatataatgtacatgcgtacattataatagcgtactaaaatatctccttgcaataaataacatattcaatataaactcccctgttttgggcctcggaagtgaataacttacggcttgtcgagtgaataactaacggctatacctagtggataacttacggcttgggaagtgaataactaaccacttacaaaccttttttcctaccgttgaccaaaggaatttcctatcaccacaatgcccattataaggtctttacaataggcattgtaacacctttataatgcccattgtaagctgcttataactgcgatcattagaacgctcaaaaagaacactgataatcaacacattaaaaacgccattaccttgtccagaaaacacgtacgacttttacaaaaaacacgtacatgttttctcggaaacacgtacgtgtttttccagaagcaaattccggtcaaaagcaataaagattctgataaagccattatctttgttttaaaatcaatacataaccatgatgagacacttaaagtacttggcttttgtagcatgtctgggaagtctttccccagccttcgcgcaaaacgcctctaaaagcctaacagttgatgacctgatcacttggcaacgaatcacggaccgggagatctcggacaacggaaaatgggtagcttgcaagatggaaccttgggaaggtgacgctaccgtttatttgtatgcggcccaagggcaagagaccgccactttttctccggccgataagttcgcattctccgcttcctcgggttatctggttgtcacgcaaacacccggaaagtccacggtagattccctgaaaatattgaagacgaaagaggacaagatgccgatgaacaccttggtaatctattccgtcgccggtaaaaaggagacgatagactccctcaaaaccttcaaattagcggacgaggcggattggatcgcttatcaaagaggccggaaggactccacgttgtacgtccgttcgctggatggaagcaagaccttccagttcccgaccgtaacggatttccaattcgccaagaaaagcggtatgctatattacacgagcgcagcggaaggagaagcaggtatattcaccttgaacccggagaaaggaagtccggcgctcatcaaagagggaaaaggcgtattcaaacaaaccacgttcgacgagaaaggggaacggctagctttcttatattgcgccgacaaagattcttcttacaaagcgttaagcttatggttatccgagcataacgctcccgcaaaagaaatcgccacccgtggaaacaaggctttccccgctgaatgggtaatcaatgagaacgggatgcttcaattctcgaaatctgcttcccgtctgttcttcggtacctcaccggagccgaggcaaaaagacacgacccaactagccgagaatcgtccgaacgtacaggtttggagttgggatgagcccgtacaatataccgtacagaattataacaaggaaaaagacttaaagaaaagctatcaagcggtttataatctgggcaacggctctatcttccaattggcgaatgaggaattaccgaatatccaattgggtaacgagggtgacgcagccttggcgctcctttccacttcccgtccctattctttgtcttccatgtgggaggcccgcacacgcagcgactattataccgtatcgctggataacggagaacgtaagcaaatcgccaaagcggattatggccgtttccgcctctccccacaaggtaaatatgcgtattggtatggcgagacggatagttgctggtacacgatcgccttggcggaaggtaagcaatatcgcctaaccaccccggagagtttcccggcttgggacgaggagaacgacgtacctgattatccttatgcgcatggagccgccggctggaccgcgaacgatcaaagtctcttgatctatgatcgttacgacatctggaaattcgatccgaccgcagctacctcaccgatcaacctgaccgtgaacggaaggaaggagaaactgtcctaccgcttggaacaactggataaagaggctcgctttatcgacctcggaaaaccgcaattattaaaaggattcaacgagaccacgaaaggatacggattctataacgcacgcctctccgctccagcagccccgaagaccttgctggcaggcaactatatgttgcgatctatcaacaaggcgaagaatacggacgacgtgatctatacgatggaaaccttccagcaatatccggatatccactattctaccttggcgttcaagaaatccgtgcaattgacacatggagacaagcagcaggaaggttttatctggggtaccgccgagttggtatcatggatttccttggacggccgtccactggaaggtgtcgtttataagccggcgaattttgatccgaacaagaagtacccgatgatggtaaacttctacgagcggaattcggagactttatataattaccgcatgccggaaccgcatcgttctacgatcgattatcatttatacaatagcaacgaatatatcatcttcaacccggacattcgctatgtagatggttatccgggagaaagctgttacaattgcctgatgccgggtgtcaccatgatgatcgccaagggatatatcgacgagaaagcgatcggtgcgcaaggacatagctggggtggttaccaagtggcttatctggcgactcgcacagacctattctccgctatcgagtccggggcgcctgtcgtaaatatgttcagcgcatatggtggtatccgctggggatcgggtatggcccgctctttccaatacgagcatacacaaagccgtctggccgctacgccatggagttctccgcttcgttatctggagaattccccgttgtttacgatggataaggtacagaccccgatattgatcatgcacaacgacgccgacggccatgtgccttggtaccaaggtatcgagtatttcgttgccatgaagaggctaggcaaaccttgctggttattgaactatactggcgaaccgcactggcccacgaacatggcgaaccgtatcgacttccaacgccgcatgttccaattcttcaaccattacctgaagaaccagaagatgcctaaatggatgtccgagggcgtacctgccgtagagcaaccgtttgagttggggtattgatcagacaattacagcttcatacgaaactcggtacggacaccgggtaaggaatcaacggttaaatcgccgccatgcaagcgcattatgcggtgggagatactgaggccgatgccgctaccaccggacttcgtagagaagaaaggcgtaaagatagcagacaatagttcaggagaaataccggggccattgtctgttatagttatatataccctaccatctgtcttcaaggcttctacggagacgataccatccgcttgcccctctatcgcctgtaatgcgttacggatcaaattaatcagagccaacacgatcaagttttggtccacacgtaccgttaaagcttccgcagaggagaaacaaatacggtcgctacccggctcggcacacaacaaccgttccatcttccgaaataaaaagattatagacacctcggttctttccggctccgggagatgcgtcagacgatggtaagaatccaagaaggcggataaattttgcgcttgcccatgaataacctccaaaccctcccgtaattgctccggagtatatgtatcggaatatttcaataggtcagcagacaaggaacggattggcgtaatcgaattacgaatctcatgcgtcagtacccgcaagatactctcgtaatataaacgcttctcttccatctcactctggttttgactgaataggaggataatccggttcatttccgtatacaaatcctttacaaaaggatcattcgttttatctgggtaccgcaaagctgtatccccattacgaaccgactcaaagaaggtagctatcttacggtttataccgttcatccaccggattagtaacagagttatcaacaggataatacacagacatacaaaggataagaagtaagaggtaccggttatcaacaatacggacccaagtaacgcgagaaacacgatcaaggagacgattcctataatcttcaagtataaactccggttaaccatagctactctccttataatctacaatccgtatttccgcatcttattataaagggtctggcggctaatatccaattgttgagccgcaagcgtcaggttccctttcttttctttcaatacctcggcgataaactgccgctccatatcctccaacgtacaaggatgagaggcttctgcaagctcctccacatagaaatcatcggcatccaaacggcatttatccacaagtaagaccgtacgttcgacgatttgctgcaacaaggccaaatcaccccgtccggccatatcggataacttaacgaccgcctccgctgtcagacgaggcaatggtttcgcataagcctccgtatatttctttagcaatgcattaataagagattcggccacagatgaaaccttatctgtatttgattccatacggtgttcccacacatggacaagggtttgaataagtttctcgttatcccaaggtttcacgataaagtccgaggctccccttttaagggaagatacagccaactcgatatccccaaaagcggttatcaagataacggccggaggattcttaagctccaaaatacgatccaaccagaaaagcccttccccaccgctttgctttccagcgccgaagttcatatccagtaaaaccatatctacatctccattccgtaaaagggcaggcaatagaacaggagatgatacggtaacgatcgtcttaaactcatgggacaggatcgtccgcagacttctcaataccgcctcattgtcatctacgactataatcttcgcgttacgcatgaagcctcctctttttttcgcacgcaaagatacgatcttttcccagctctcagtgtccaatatttagacaaatccagtcctttacgaacgtttcctccgattttatttgccatattccacgcaaccggatagctttgaaccaacaaacagataaaaccatggaatccatatctctaaaacttatattccgtagctggtggcgaaacaagacgttcgccgtcatttccttattgagtctggcggcaggcatcacttgtaccaacctactgatctcatacgtcatttatgaatctaggatagaagcccataatcccaataagtcgcatatcatctatatggcacaagactctcccttgacctccggagagaaagtatcttttattaaagggaagatccctgtgcagctaaaagaccaataccctgaagttgaggattatttacgactgaacatagacaatgccgccaccatcacgatagaagaaaagcgcttcaacccaatctcgatcgtcagagcagatccctcctttcctcgctttttcccttacaaggtagtggcaggagatataaacaaggcattaacccaaccaaacgcaattgcgttgaccgaataccaagcgaagatattcttcgggaacgaggatcctatcggtaaaaccttctcggcaaagtacgcttatgagaacgagacgattacctacgaggtcgccgccgttatcaaagagtaccctcaatcattcttgaagttcaacgcattggcaggtactacctcccaattcaatggcggccctaccttattactggtaaacgatctcttcaacattgatacgttcactcaaaaactaaaggatgataaggtacctactttcaacggaaccggacagtattatttctataccctccaagagagttatttccaagagcaaacctatacacaagaatacatcccctatatccaccgaaaccagaaagacttactgtacgttggtttgttctcagccatcctaatcctcgtgatcgcctgtttcaattatgccaacctaagtttctcccgcattttgcaacaggtaaggatgatctacacccagaaggtgatgggagcatcggctgggcaaatccatcgccagctattcttggatactttccttaccgtgctgatcgctttctttttatccttgttacttacactagatttcctgccggctttcaaccggatcgtttccggacgtatctccttgggatttttctttagtggacaggtcttacctgtgatcgtgacactcatcctagctctatccattatcccctcattatatatgagccataagatcaactccctttcccattccgagtataaatcattcaccaccggtacccggaagcggacaatcataagcgggctctccatcttacaattcgccatctcaatagctctggtattcgccacgctaaccgtacggcagcaactaacgctcactcagacaaacggtgaacgttaccgggacctcatcgaaatagccgactggagtgggaatcatatacagaccttctctgaagagatccggcgttatccttccatagaagagatgtgcctttcgagaagcgggatcatacagttcaacttgcggacaatggtcttgaaagacgaaaacggaaacgaactaaattatacgctaggccaatacgaaggtgatagtactttcctaaaggttatgaagataaacattcttcaagggctctcagagcgagaggctctaaaacaatacagcacacccgtctatattaacgaacaatacgcacgtttgctcgtgcccaaaggcgagaatcccgtgggtaagcctgtccgcctttacgacactgaattcgggaagatggaaaaggagggagaaccgatagcgattatagcagggatcgtggagaatctatatacaggaaccttacgacaagaggtttaccctagcttgacctacctaacgcatactcccccctataacctcgtccaagtccgactgaaaaaagagcacagagccgaggctctagctttactgcaacaaacatgggaaaagatcaatcccaacgtacctttcgaataccaagatatatacgaggaatttatgttatctaaccgaaaaacgatcgaactggcacatttgctcatcatgtactcgatcatcagcctcctgctaaccgccttcggattattcggcatggctctctatgccatccagcagcgtacgaaagaaatcggtatccgtaaggtaaacggggctacggccggggagatcttgtatctattaaatcgtcggtttatcggctgggtagggatcgctttcgcgattgccgttcctatcacgtggtattcgctgagttgttggctggagaatttcgtatatcgggtggacatatccataggaacatgcctgctgtccggcggtatcgtattgatggttacgctactgaccgtaagcaggcatagttataaggcggcatcccgtaatcccgtaaatgccttacagagcgaatagcgaaaaggaatattttggatactcacctcagtgtcttctcatcaaggaatgcatcacaatcatcatacaaattgaaaactaattcctcgggaattaccgaccttgatcgccacgtttcgatggaggaataaaaacgttcgaataactcctcctccaatcgctcggtttgctgcatatacccattgccgcttagattgaaaagtaattcccaatggaaataactttccgtattcgtcccccgatgataactgtaaatcttatcccgaagcatgttcgacgcgtcacataacggagcatgtttattttgatcgacagttaacgccttgggcaacttcttatcggcgcctttcaaccaagccggaaccgcaggagtaaccggtgggtaaccgataaccgtccacatcgtagtgaacgaagcatcctcgtccggccgtacaccttgaatagccacagcgcaagaggtacttctacgagcgataaaatcctgctccgcaaaccaaccggaagtctctggcttattatgttttccatctttcaagtcgatacccatcaaaggattatggaatgagcgagataaatgggaccgcacacaattcttcaagttttccgcatcgcgatttttccacataatcggacgtccgtcaggtgttaccttgccagaaatgatagccgacgtgcaagcattggcaaattccatggctcctgataaaacaagagccatgagacacaatatatttcgttgcgtactcatccgacaactacatacatttgttataaaacaacgcattcatgaacaacttactagttccaaagaagtaagaacggaaattcatatcatcagcaaaaacaatcaccttaccgcttctataaggtttcaccattatagcaggctcctctctcaataggttcgcattatccgccgacaagaatcccgacaacaagggctttttggtataatataaaggcgaaatatatggatccctatctttctggaaaatgatatcattcgtttttataacagcgatctcatcttgatcaagtccccaagctagcggatgcgtcttatccaaatgacaattcaaaattacccctttgatcaactttccggcttttgcttccgccttatccgcaaaagaacgataaaccgataagctgtccgccttttcaagcaatgtttcctttgtctttaaagagataagcccttgtttgctagcccatgcgctagcctttccggtagcgatcaacactcctccggcagcaacccactccttcaaggcagtctcggtacccttagttagatttggaacaccattagccaaaatgataacattgtaagccttcaagtccttgcctgtcaaagacgggttctctatcaataccggacgcatctgaaaacgcttatccaacaagaaccaaatctcacccgattccgggatacttacgccacgtcctaccaacatagccactttcggctgctccaatggtttaaaagccgggctgccaaaatccacatcagccatcaatcccgtgttggccgaatagatatccactcccgtatttttcgccaactcatccaatgtcgcatagagcacatccgaaggaagcggctgattatgcgtcaatacctggtaggtaccatagcccatcgtccattctccctcttcgttcttaaattggaacggacggttggtcgcactgacccgaatccccttacgctgcaactcatagacaaccttaggcgcataaaactcccggttctcaaacacataccccacccggctttccccgccgatgagccgtccttgcggaaaatcatttcgctcaatccgatcacccatcaatccggcgacactcttcaccggagcacactccaagttaaacgcatgcgggaacgtccatgtagagatatcatagaaagtactatccgtatattctaaacaatcctccataagcaccttaaccatcgtactgtatttttgcgccaccggaatgacataggctgaacctttttggaactccttgttacctgcggcttgatagtccttcgccaactgatagacctcgatatgatgacgggccatattctccaagaaatgaaaagcgacagacttagatccgcgtgtatcgaacacatagccctgtaccgcctccttccgcgcctcagaagccgtacgttcataatattccttctgataagccagcaaacgggtacgcatcgccttggccgcttccagcgtagcgcaagaggctaatgcctgattccggatcgtccagccaaaggtccattccccgctcggggtattacgcaaatgtccgcgcgtggaaccttgctcatatagcaggcaaacggatccatgcgcatctccataagcagccccttttccgtaatagaagtcatcataaccctccttcgaataataagtcgtcccaatccgatcgagtgcctttgccgtataagaagaaatctcggctgtcaagtcttgattaagctggggagtaaacggatgggtacgcttaggatgtcccggactgaaataataaggacgtaacgccccttgctcatgttgatccacgaccacattgggcaaccattcaaaatatccatttaagccattgatcccctcgggatgttgtgccataagcaagtcgcgattacaatcgatccaataatggttcgtacgactggaaggccaaggctcggtaaactcacgtgattttatatcgctaacattcgtgaaacttctagaggaattcacccacgacgcaaaccgattgattccatccggattggctccgggagtcatcacgacaatctcttggtctagtaattcctctatctcaggcccttgtgccgccgccaaatgataggcaacagccaacgaagcgttcacacccgatgcctcatttccatgaatgctataaatcaagcttacgatcacaggcatgtcgtctatcactacgcttctcgatttcgccacgtcgctcaactttaagtgctcctccttcagtcgatctatattcttttggttctcggccgaagtaaacacgacctctataaaaggacggtgctgataggtacgccccgtctccctaatcgtgacacggtcgctgcatcgcgccaatgttctcatatattccactacttgatcccatccggcatgttgttctccaagctggaatcccaagattttttccggggtaggaacctgagggtcataaacctgagaaccttccggcaagaaatacgttaaatcatacggatactcatccgcttgtggttgagcaaaaacacctgtcgccaagaagattggcaacaggcacattaaaaaaaatcttctcataactatttatttactttatggattcggttcgcaaagcggattcagttgagtctccttatcaggaatagcccattgccaatccctatgtccggccggacgatatctgttcccgttacccgtcaccgttccatctccatacatattgtaattagaagcttctggatccaccactttaggcattgcgtctttgttccaatattcaatcaaaccattcgggaaaacctcaggacgaggagccggtccacggtccaaatccatattcaaacgtttcaagtcgaaccaacggaaaccttccccccaaagctctatgcgacgttgagtcatcacctcttctatcaagttttcgcccgttttcgtagacaatgtatactccggatcccgatgacttgccagcggataaagagcctgagccgctttgcctggctccccagcacgtgcatatccctccgccatgatcaacatcatctccggcaagcgcatgaaaggaacatcccggccacctttcgtcgtaggatccgatacgataaacttattggccatataattagcatacgctttactgttacactccgcccggatcggtcgcggaagagtattgggatcggtcgccctcggaaaccaaattcctttacgcacatcggtatcactgatcttgtcgtataacttattataaatcgcacgaggggtattgccattatacgaaatgatctcattcgacatatatccatggaagtgagtcaagttcggagcttgctgcaacaaaggattcgatccccacaaccattctgtatttgattgatcgctaaaacgatcattcaatgtcgtataggtatcatcttgcaatttggctcctgatagatcaacgaccaatttagccatttcagccgcttccaaccatttaccttgcgtcaataagatacgagccttcaaaccgcgagccacgtgcaaatcaatatgcgacttattagtccgtttctcctccgtagcacccaataattggatcgccaagtcgatatcctcattgatctgcgtatacacctcctctacagaagctctcgctctcggctccgttgagttatcgttacgaattaccacacccaattgcgtgttatcgccctctgccttataacggccgccatacatctgtaccatcgtgaaataggcgaaagcccggtaaaaatgggcttgccccttgatataattcctctcgctctccaaaccttccgcagcatcgatattatcgataatcatactactgttagagataaaatattgcaacaagcgataaaaatgggtcgcgctaccgatcgtcgcattccgatggctcgaccattgagcctgcttttggaactgcgcattgctgtacgtatataccaaatcatcccccatcacctcataccaaatcatcaacatatcgtaaccgccataaaaagccgaactagacagatcacccgtccacatcaatttatgcaagccatttacagccaacatagccgattgggtatcattgaacactgcttgctcatccaccgtttgtgtggaagttgtctccaaaaaatcctccttgcagccattgaataataccacaagagatagcaacactactatatatatatttttcatattgaacatgatttaaaaagtaagattcaaaccaaaagtaaatactctcgcaggcaaataaacatccgcattaccactatatcctgagaatatgtttgaacgagggaaaataccttttcgtttcgtcagcaagaatagattctctcctgacgcatatacccggagtccttgcatggaaaccttctccagccattgcttcggcagatcatagctcaaagtagcggaagccaactccaacatattcgagctgatcaaccaacgagtagaagttcccgcattcatattcgtatctgcgaaatcctcgatgcgaggcacattcgtgacatcgcccggtttctgccaacgattcaagatatccacatgcttgttggaagtcaaggatgcggatcctgaaggctgtgtcatcaaatcagaatatcctacatcatacatcttgccacctagctggaagttaaacaacaggcttaaagaaagattcttccaagatacgttcgtattaagacctcccgataccttcggtgtagattctccggcccaatcataaatggcctcattcacgttagtcgtatatgtttttccatccacctctaccaggtcgacagactccaccgtcagttccggatccggcacatagatagagtttccggtagcaggatctactcccgcccactggcgaagataaaactcatagcgcgaatgtccctcttccacccgatgtactccgctgttataaggttctaccggcaaagaggtaatccgatttttcaaccatgtagcgttaattcccacagaccacgtccaatccttcgtctggatgattcttccgttcaaatcaacttccacacctcgattgtacatcgtacctgcattcttatatgcgctggtagtacccgtatccggtgcttgcgggatcgagaacaataagttgctggaacggcgatcgaaatactctacactacccgacaaacggcttttaaacaactcaaactctaacgccacatcgccattgcgagacacctcccattgcaaatccttattacgaacgacacgttgctggatataaccggcctccaatccgttcatggcctgctcgtaagccgcttgccacgcatagtagctaccgatggcatcattacccacctcaccgtaagcgacacgcaacttcagcaaatcgatgaaatcaagatcttccatgaaacgctcctcgtcaatacgccaaccagctcctaccgagaagaatgtaccccaacgggaatccttgtaaaagcgggaggatccgtcgcggcgcacggatgcagaaaggaaataacggctgttatagtcatagttcgcacgggcaaggaatccctccgtcttgtaggtattcgtataagagtcttgctcgtccggcaccgaataattgctgaactcaaagttgccattatggatggtctggttttgcatggagcctttcaggtaattgtactcataatcataactctcatgtcctaataagacatcgacatggtgattgccgaaattctttgtataggagagcaattggttgaacgtccaagttgtctcaaacgaaacggtcttcgtgcttgaccccacctcagtcttctccggataatagatactggccgaatgccctaaacgagagcttgttcccacggctccgttcaccgtaaacttgaaatcattcaagaaacggatctccgcatacaatttcgcgttcaattgattccgcttgtatccgttgctgatattttgcaactcaatagccgggttattaccagagatatacgcacgcgaaggcgcttccacaccctcctcgatcgtataggcctgaccgaagtcgtacactttattaccattggcatccagcacatattctttggtacgaggatcgtgtacatggatcggatagatcggtccgatatagcgagtgaatcggaaagggttgttgttatttcccgaagcttgcgactgctgcccttccgccttgctgatattcccagagagcgtaccgccaatcttcaagaacgaggtgatctgcgagttaacattcgtattcaaggtatatcggtcaaacttcgatccgatgatataaccaccttccgtcagataaccggcggaaagataataatccgacttattattacctccgctcacgctcacgcctatatccgtacggctgcccgtgcgctggatagcgtcttcccaatcggtatcatccgcccacatgaacgtagcgttcgggttaagcacaccgttcgcatccacgacctgatcgtccggcacgttaaacggattgaagcccagcgttcctgaaatcaagttttgagcggctgccattcccgcttgctctggtgacgcaccaccacttatcaactggttgcgtgcgctctcccaatatactttcaaataatcattcacgcccaatcgttcataatcctgactttgccgattcgtgaatccttggttgattttcacattcaccgacatacgatccttactacccgtcttggtggttatcaagataacaccattaccacctcgtgcgccgtacagagctgcagatgaggcatctttcaaaacagacatactctctatatcattgggattgatactactgatactctgatcgtagggcataccgttaagtataatcaaaggggtattcgtcgcagaaatagagcccaatccgcgaatatagatatccgaatctgaaccgggctgaccactggctgaggctacttgcacacccggcgtagatcctagtaaggctgaagttgccgatgtaacaggacgagcctctatcttctctgacttcagcaaactggcagatccagtaaacgtacttttcttagccgtaccataagccacgaccatcacctcatccaatgtttccgaatcatcctccagaagtatcatcatctctgatttgatcggaagcgtttgcgaagtcatgccaacaaaagatacggtaagcgtacgggcatttgccggcaagttgtccaatgagaaacgtccctccacatctgtaattgtaccgattgttgtacctgtcacaacaatattagcaccaatgaccggctcgttatcaactctttgcaaaacacgtcctgcaactttccgggattgttgttcaatgccatttaaataagaagtaggcaaagcctcggcagaaacactacctgccactgaaaaagccaataaaaaatgagctaaaagcacgtttttaaaagtcaaacaacgaatgcatccttttagtccgtgcatattgtcaaaaagattcataataatagttttagattttaatttatcaaacacaataacatccgcaagatcagaataaatattataacatcaaagtaggaagctcattttatttacattctcgtataaataacacataaaaagtagcgaattttcgtgaacgtactccatagaaacaagcctgctatccggcggtatcgtactgatggttacgctactgaccgtaagcaggcatagttataaggcggcatcccgcaatccggtaaacaccttgcgaagcgaatagcgaagaggaatattaaactctattcgcccattggcaatttacttaactgagatatcgcctgtaaattggaataatcgtattggtaaaggccatcatcggcgatcatcatcaaggtgttcttaaaagggattacatcgtaaccctccatacctgcataatgaacaagctgattagccagcaaggtcataggatctttcgcattgaagacctttaacccttcgtcacagaggaataaagtaccgttatcgatacctaatcctttcggacatttcatgccataagcaaccagcaggttcggttggtccacatcacttacgtctatgagcatcagttcattggtattttgcccgcaagtatttccggaatgcacggtcacatacgctaagtcatcctccacgacaaccggatcacaaccaaagacatgacttacggaagaacgatacttaggcgctaacggatcttccagcgaatagatcaacatgccggtcggagttcccatgaacatcttatctttatagttgaaaagagtctcgacaccacgttgcaaccaaatgtcgtttgtcgtcaagacaggcttgttcccagacaggtcgaaaacacacatgatattctgttctaccgtatataagtacttaccataaatagaaaaacgagccatagatccgttcacgccctgcgtggaagtacccggcgccgcatcgttcgccatcagatcaccgccataactcggataatggtaaatagtttcctcccgttccttcggctcccaaccaaccacgacacctttcgctctcgcttcttccgaataacacatattataatcgaacccatagccattctctatggtcggaagcgcataacggaaagcgttctccacacgaccttccaattcaggtctctccggatcggagatatcgaaccagaccagatccacatacgaatccgcatacaatttatcatccttgatcgagagatcctcgttaccgatcaactctacaaagcccgctatccggggagatgccggattcctgttatccacgatatggatgcccttatccggggaagaaatatacaggtaatccttatagaaacagatctttccccgcttggtgattggcaccacctcatccgtcaccttcactgaattccgaaactcggagatcgacatgaataccggttcgttgatagcataccgcacgacctccactctcactccatcatccttgcatcccattaagacgcaaaggctaaaggcaaacgcccaataaaaaagtttccgcataattataatagatttaatcattaaaaagcatatcgtatacctgcgctcaacccaaatcccaacggcttgtctgtacgaatactagccggttgatcacagtcgaaataatgggagaagcgaggctcgaaatagagactccaatccccatagaaacgataagcggcaccgaccgaggcattcacggaccattgcataccgtggatgccctcctttttgctcttagagatagtcgttccgtttccggcgatataaccgctatacacggcctgcaaacccttctccatcataaagcctccggagagatagacattccatcgctgattcttccatacataaaccaccagattcaagggaatacccagataatgcaaagacgatttcacctctgacgggcaatcccctcccctcttgaatgtagtggataaatacgtatacatcaatccactttccacggctatacgccggctcaaatccttccgtaccgtaaaaccgaatgatatcggaagggagtagctaacgtccggataagattcgaacgaacgattatccaagaagttctcatccaccttagaactccgtaataccggggcattacggaatgagaccgtttgaggaggcgtattaccactctccttttcatcatcgtctttatccggcttatccggatcggggcttcctgccgaattattcatatctcccggagaagaagcatcgccataactcatatccgtatttaaaaagctatctacataaccactagagccaacggcggcggccaataaccacttgttccgtttactcttcttggctttctttttcaaagaggcttttcgtcggggactccgttcgccttccggtagaggaaccgtagagtcacctcgcttaacgactatgtccgtcgaatcctcggacgcctcctccttcacagacggttcttctacgatagccgcaatcgcatccttctcaataatcccgatagtctcactcctctcatccttccggatcgtttccttttcccaaacaatagcggaaggcttagcccttttttcccatttcagcactttcgccatacgtttctttacaggttctacaggtaaaacgggacgctccggaagaatattcatttcctccgctttctccgatatctctttctgaaaggggctcaattcctccaatggcatcttctccggggaaggtagcagccaaataaccaaggccagcaccgcggcggcggccaagcctcccgtccacaaccaaccccgtggtctcgctctccggttcatccgggcctccacctcatcccagcagccggcatctaccggcaaccggtgctcttccaagcgctgccgcatatagccgctgaaatcatccagccgttcgttatgatccttatcgtcccgcattttcataccttattaaagattgtacactcttttgcaaagcgttcctcgcccggataaactgggagcgggaagtcgcctcctgtacatgcagcatctcggcgatctcgctatgcgtatatccctctatcgcatataagttgaagaccgtacgatatcccggcggcaattgggccacgcaagccaacaagtcatctgccgataaacggtctaatacggagtagttgatatcttccaaactgtcgtcatagccgtccagacctacacttagcctcgtgttctctgaagaccggagatattcaagagccgtagtgacaaagatccgccgtatccatcccccgaaagccccggagccggaatacgaccggatcttcgtaaatatcttcacgaacccgtcctgcagaagatcacgggccgtctccctgtcacccacgtaacgcatgcaaacactcatcatagcaggagcatattgctcgtacaattccttacgagcccatgattcgcctcgcatacatccatcgattaacagttgttcatccataagtacttatgctctctattatatggatgaaataggtatcctaaaagttgcatcttattcaaaaaaaagttaccttcacatcaaaaataggaggagagtgtatgagacgaggattatttatattcatggcatggatatgtgtcgttggaattcaggcacagtctgacttttcgtttattttaaataaagaaggtaaaatcatcgtcctgcctaaaaacaagacgtatgagttgaacatcccgaaagcctcctataagacatttacccctgcggggacacgggatatcgatattaaactgcgggagttcacgcccgatattccccatacgtccctacaagagcgtccgatggatatgcagatatcttccgccgcctatcagccgttctttaacgtatataccccgatgcttcgggaggtatcgcctatggcgttggatttcaatgagacttatatgaaacggctaaacgaaagtttcgatcttatcgctaacggtgttcaatatacatggccgggagtcggaggtatgacgatcatgaacgggggtatttcttggcacagcggcaattggagtctttatggcggaggattcgggggtcgtttctttagtcccttcaaccctagtcccggaataacagcgggtgcaaacgtacaactggaatatcaacctacagactggttgaaattgaaaggatggggacaatatgcttattacgctgacgagtacaacaatccccatatgctcaggaatccctttttttaccatactcaaataggcggtgccatggagttcaagatcactgataatttctggatgggagccggtgttaactatgaatacaacccggtacgacggaaaatggaaccacagttcctagtctatcccgtcttcaaatcgggccgcttcaagattggaatgtgaggaagacgctatttccgtctcaaacattcctacatggcaactgcctaggataccgacaccaccgtctatattgctaaatacacggatcggttcggccagaccgccatcgatcaaaaggttcgaaactgaatccgtgtctttatcttgcaaaactttcagatatcgatagtattccgccgagatagcatataggtgtacccgtaggtgcttgggtggaatcggaaggaaatcttcctcatttagatcttccatccctatcgaatccgggactacttttagcggatatgatccataataaggttcataataatactcatccgttaagtgcaaggtatattcttgcccgtttattaactcatcagaaaagacctttccatcatacccatacatccagtcattgccaaagatttgatccaaggctgtcaacgattggccaaaaacaggttcagtcgcatagtttggactcaccgagaaccatttatattctcctgtatattccttagctattccatcaaaaacaggaatgccctcttccatacgaagtaaataataattctcctcggcagggttatctttgagcgttacctgataaatcgcattctggcgagcagaaccaaaagagccagctaccgtggcataggttacccccgctttcaagacctgagcaggctcaggcatgaccgtctcagcacttgccacaccatattccggataagaggcttccacacggatgcgatctcctttcaccggtataaaatcagacttgaaataacctttcgtgttaaatgcctcatccccctcttgaaagctcatacgctctttaaaaacgccattcacgaataaattcacctcggctttatccaaagtcacgttcggatgatcatccgtaaaaaaccaagtacgggagacacttacggttaagggttcgccagttatagcgacacagttcactaccaaagtgggatctggccgtaaggattcaaggtcgatctccttgatgcaagacatcaaaccaaacaggcttactatacaaatcgtatttatcaagatactctttatctgtttcatcctcctagaatttataagtatatgatatggaaggtatgataggcataatacctatcaacttaaaacaaggtctattttgactggaatgagaagaagagcccgggaccaaattaataatcggtgtccagttctcgcttttatagaccataaacggattcatccggctatatacattataaatactgatattccagatgcccattcgtcccttcttcttcggacggtaaatattaagtcccaaatccagacgatgataagccggcatctggtaattattacggcgtgtatacaaatccaccacttcccctgatggttcccaccagttatccatcttgtattggttggaaatagtaagcgtaccagcttgctcataactctccaacgacaaggtcattcgattgccggaagtatacgtccaagcggctgtcagttccaccttatccgacagtttatgcgaaaccacgatattcagcttatgccggttatcgtaacgtgccggaaagcgtcgcccgttatcgatctcatcgaaacgccgatccgaccatgaaagtgtatatcctatccaaccggtcgtacgtccgctttccttgcgagccaagaactccacgccatacgaacgtcccttgccaaccgccattttttcctcccaagccgccgtaccgggcaagaaggaatagccgtctttataatccaacaggttcttcatccatttataatacccctctactgagaaactataagaacgcatcagattataatagaaaccagcggaaacttgatcgctgattaaaggtttcaacttacgggtaacaggcatccacgcatccgtcggcaaatttatataactgttgcccaataaatggatatattgccccatacgggcgtatgaggctttgaagctaagatcgtcacgtagcaaccatctcaaggaagcgcgaggctccaataatgtataagccttccgctccacattgaacaggctaaaccgaagccccgcattcaaacgcaagctaggtaagacattccaatcatcctctccgaagacagccgcctcacgggcccatagcagatcattcgtatatattttccctatattcgaaaactccagcataccggaaccggctgctttcacctcattatactccgggcggaaacggtgcatcaagaaatcccctccaaaacgaatcacatgcgacgtagaaggcgtgtaatcaaaagaggaacggacgcccatatccaagatagaggtagaactactcgtttccgatgaagaagagagataattatcttctccttccacaccataattatattcttttgaactccgtacattcgagcgataccgtgaaaagaccccggaaacccgtccgaacaaacggttattgaagacataagtccagcccaaggttcccatcaaattaccccaacgcagcgatgaatgggtaccatccgtataagggacttgctcttcttctgttgagaaatccgttccccctccttttaatacatcattcccgttatataagctgaaaaacatccggctacgatcgctgaaacgatgattaagctttaaattcaaatcgtgaaaagcgtaacgaagatttattttatgaccgtcttttcgaaccttatttgctatcgctatcgctggggcagagagtacatccagccacgagcgtctaagcgctatctgaaaagccgtgcgatccttgatgatagggccttccaagctcagattaccggagatcagcccgatcgtagcgctaccatggtactctttcatattgccctctttggtatggacatctaccacagacgagagtcgcccgccatatctcgcagggaaacccgccttgaaaaagtccagattacagatcgcctccggattgaaagcggagaatagcccgccgacatgattgatctggtaaaccggattaccgtctatcaaaaacagatttccatcttggtcgccgccacgaacatataaaccggccagtccctctgtcccactggctacacccggagtcagttgcaaggtcttcacgatatctgactcaccaaacagggtcggtgtcgccttgatcgtcttctggctaaaccccatcgttcccatcaaggtgttatttacagacaaacgatcccgttccgaagcggtaactaccacttcctccagacgagcgttcggacgcaactcaatatttaatatggtatccctatccaattccgtgaaattaaaggaacagctctcatagccaatgtaagaagcatgcaagcggatattccccggcggaagcgtcaaactgaaaaaaccatagctattcgtagccgagcctttccggctggcgacctcataaacagaggctccgatcagagactccgaggacgcttgatccctcacgaagccgctgatcgttacctgtctctgtctacgcttcagaatcacgatctttccactcaccttatacacgatcggatacgactcgaacaagcgggtcaaacaatccgtcaatgcctcatctttcacttggaaactgatcttcggaagctctttcaacaaagaagactcatacgagaaggtcacgcccgcctgcctttcgatctccgacaagacctccggcaacgaaacctccttcatacgcaacgtaatccggggatcatccttcgtcttggctgattgggccaagaggtctggtacaggcataaaaatcatccagcaaaaaatggccataagccatttattcatccactctgtcatcattctactttattgagttcattgataagacaggatctcccggaaatacccctatcaaggaaaagcctttttttcatacctcgtgaacttaccgcttcatgatgtatgaaccggcaagcgcaggtcgtcaacgcaggatgggcttatccatcccaaggattccaataaggaggcaccgtgtctctcggcatcgtgatacgcgatttatcctcttgatatccggtgacaatcccaaagccgttctccacattcgaatacgtatcggcaggctctatcaacgccccgaaattcgcatcgccgatcgtgatagagtaccccctcataatcttcatatatcgataataatcctcggagatagacaacaggcgcacatcgtaatgaacgtccatagaaagggtatcactctcatacgagtattcaacaggaaaaacagaaaccttaatagcattcgtattaaccagatcctcccctctaaacacgcccatacagtaacgcccatccatctggctcgtgataggactacctccaaaagactggaaaacaggatcctcataatccacgctaaaaccggaataataccaactatatcctcctaagctacggaaagaggttacggtacgggtactatcccccttccggaagtccaagatctgctccacgattaaacgataataggaatccgtctcaaccccgattttaacagagaaacgcagatattcggcatagtaggcagaagatcgataggataaggtatccacctcataaatccgtgcccgaccggggatacgagtttccccggataccggctcatacccatcggcctcggcctcaatacgcaaacgatccccctgtctcacgaaacaaccgggcagaacatattgcccccgtgaatgtatagaatcttccgacaggtcatcattgcgcataagaccttgaaactcatcattgacatagacacggactttcgcgtcggataactcaaaatcgggaacgctatccatgataaaccatgttttcgagagatgagcacacacctcctttccgggacataccgatgcgttcagtacaatccgatccggtagatcctccaaatcaatctccacatcccgaacgcaagagaccatcaataatcctaacacaaacaggtaaggtaaatatcttttcataagctagaatttataagtataagaaaccgagggcatgcaatagaacaaaatcgtctcctgtagcaccacctgatatcgctgatttatatcctggtttaccataacctccgtcatgaagggattcggtttcaaatacgtattgtatatgcttatgttccaaatccccatccgacccttctttttatatcgataaaaattcacgcccagatccaaacggtgataaggagacaattgataattattacgagtgctcaaacctgaattcatcggtctgtatgaatctactccggcatacccgttctctttctgataaatcggagacagatatttatactccggtaagctaatatggtttcctgaggcgaacacccaagctcccgttaactccaccttccgggataacttacgagaaacgaccacattcaccttatgccggttgtcgaagcgaaacgggaaatgacgccccttattcacggaaccatccggaaaccaccgatccgaccaagagagcgtatacccgatccatccggttgtcttcccatttgtcttttgcgccataaactccacaccataggtcttaccctttcccaaaccgacccggtcttcccaaccggagaaatgtgtctcaaccggccaatgatccttataatcaatcaagttattcaaccgtttataatatccctcgatcgagaaatcatacatccgtttcagattataataaagcccggcagtaatctggtgagaactcatcggagggacttgctccgtcaccgggacccaaatatccgtaggctggttcacataggtattcgataataagtggacatattggttcatcttactgtaggatatcttcgccgatagatccggacgaagtaaataacgtgccgacaaacgaggctgaaaagaatgatagatctcattctctacatgaaacaaggtataccgcaatccggcattcacccgcaagcgatccgtgacccgcatctcatcctcggcaaacaaagagaactcatgcccttttatcaaggaataatcatacaaaagctcatatacgggatttactaacgaatcgttcacccaagaccgttgctggctattctccgggcgaaaattatgatacaggtaatccgtgcccattcgtatccggtgattcattgaaggagtgtaatccactgacagccgtacgctcagatcctccatctccgatttataacggctatcccgcttaattgattgccgctcttccctatttccttcgatctcataccccttcgcctcttgccggatatgcgagcgaaaacggctgtagcccaccattagattaccaaacagcttttgcccgaacacgtagttccaccctgcggagccgatcaagtttccccaacgccagagaaacatatcatccgaatcctcatgcttctccttgcttccctgccgaaaagcatcttgccccatataaaagctcaaataggcccggctacgttccgagaaagaatggttcaccttcgcgtttatatcaaaaaagtgataaccgaaactctccttggtatcactgttcttattaatgatcgccaaagccgtccctgttatcaaatccaaccacgtacgacgtaccgagacattaaacgaggagcgatccttaacaatcggcccctccagattcgcccgtgcggaaagcaaacccacggagatattcccgtgatactcctgccgattaccgtcattcatacggacatctacaaccgacgagagccttccgccgtattccgccggaaagctccctttataaaaccgggtattctttatcgcatccgggttgaacgccgagaaaaaccccaacaaatggttcacatgatagaccggatttccatccagcagatacaaattctcatcggccccgcccccacgcacatacaagccggtcattccctcggtgcctactgccacgcccggcaactgctgtaaggtcttcaccagatccgcctctcccagcaaagcgggcatcgacttcacccgctcggcaggtacgtcgatcacccccgtgcggctactcaatatctcgtagcgaggccggctcccccgaataacgacctcgcctaacgaggccaatgacctcaacgggaagtcgatcatcgtatccctttgcaaatcgatctctatctccatcgccttaaagcccacgtacgaggccctaaggcggaccttaccgggtggaagtatcaagctgtaaaagccgtaattattagacatcgtccctcccctcgaacttttcaccagaaccgaggcccccaacaaactctcatacgaggctgaatccctgacgaatccgctgatcgtatattgacggggctttcgctttaagatgatatattgccccgtaacccgatagataatcggtaatggggaaaataagcgcttcaagcagtacgacaaggattcatcccggacagacagggaaacctctggcagctctttcagtagagaagactcgtacgagaagaacaatccggtttgtttctcaagctccatcaatatatccaacaggggaacctgccgcatatccaacgtaaccgtcggcgtaggttcgggcatctgcgcatatagatgtcccatccaaccgggaagcaaaagaatccctatcagccatacaacaatagatctcataaaatgatctaattttatttcttcgaagtggaaaccaaacgtgcgtccaatgtctggttaacaacctgcaatacatcctccaagggcagattattaaaagtagcggtcaatctcgctccctcattctttgtccggttcgcgatcttgacttgataataatcactcaagtcctcaatcaccttatccagcggtgtctccataaaacgaagttgccctgtcctccaagccaacttgttcacgtcttcttccgtcactaccgttatctccttgttctccatagaatactgagccgacattccagcggtaagtatctaaggggggtaaaacgaaatgcgtaaaaacagtatagagtaaaacaggcttgttttaactgaaaaacaacaggttaacaatatagttaaagaactgaccaagaaaaacgaaacgcacaaacggtttaattgaattgaactgcattttaattttgaatggggtttgaacggatttcttgaacataagtttaattggacggcagatttggtttaatatggggtctacatgggcgcaaatgaggcgcactggggcgttttgttggctcggttgattgtttgtccgctgaaagaatgaagaggcttaaaaagagcctcttttcttttgctttgttgtggattcgatttgttaaatctgttgatagattattctatataagtgctatttggtatatttgctacaaagtaaatactaaatgcgttatgataaaggttatccatgtacatttgatctacgagaagaagaactactatttcggctcgatttcggccatctttgatgtgctaacggagaaagagataggcattaccaaaaacagccttctgcacgctggtatgactgacgggagttgtaagatcaccaaacgggctatgatcattcaatcgcacctgataagggttgctaagtagttgttttatcagcttttaatacctgtttgaacgttttttaggtcgaatagcgggtttcctgtcgtcttgaacggctggaaatgccgcttttttcatattggctgtgcacttggctgtgcgtttacctgtgcatttttagcagtgcaaaaacgaaacgtgccgtttggctgtgcatttggctgtgcattatcccacatttttttatgcgattgatgtatataagacgcttttcagacggttgtttttgtcgtttttgatattattagttgggggaagttgtatttttcaaatatttattcactcccctatattttaagttacttttttgtctgttagctatttaccatttttagggcaaatagtccaccgaatgcgttttaacctacactggcaatggtggaaccattcgcagccgatacagcatcccccaattcccttctgagttgtgtaatcgtttgttctaactttcctatttctttcgcctgctcttgtattgtagcaagaagtttatctactatttctggatgaacctgttgcttatattcttcagtttcattatctttattattggatgaatgaatgatgtgcgtatgtgttggctctaccgaacggcttgtttttgacattgttccgtttcctgttaatagccattctgtattaatatctgaaagcatgtttgcaattgacagtaaaatatcactacttacttctggatattcattatttcgtttatccaaattgaatacccgattaagcttttgagaacttgatagatttattatttcactaaagcgttttacactaccttttgcgtaatgctctactaagattttcactctttcatttattgccggcaaaggcttgcttgaaaaaatgttttctttttcttctcctttattgctcataattgaaaacatgtttgtatatttgcggcgtgatcaaaatatgaccacgcctcaaagataagcaaaggcggtcatatagacgaattttagaagtaaaacttaaaaatgacaaaggatatgaaggacaagattaaggaatggcaagtacagagcaacaggttaaaggttgcgaacctgctgatgttggacggtgtgagttttagctataacaaagagaatggcattgtgttttccgctccagattcttacgtcaagaaaatgattcataccctgaggaactgctacggatgtggcacgaaaccgattataaacgaatataaataagaaacgatgaaggcaaaagtgattattgcgcaggcgacggcagaaacagtaggatttcttcacgaactggttaagggaatggccgagaaaacggctatcaaggcttatccgagtgtggactatcaagccgtgtttttcccagtagataaacacgatctgtcttttgtaaagcaggtattggcagataggaacttttcttttaaggtggaaaatgctgaataataacaataaatatgaaattatgacacaaaaagaatttgaagagagaacaggcatcgtgtcgacactggaagattttgaatacatccatgaagtgtatatgaatacctcaatggataaagacgcattttgcaaagagttcaagaagcatggggaaagccaaattatccgagatatctatatacgggtagtgaactgtaatgtgaaattgaatcgacaaaaggaagttacaaatgatcttgccgacttcctgattggtaaagctcatgcgtatgaagacactgacttccgcaaccaggcgatgaaactggttggtgaggtggaagtggtcaagcgaacgattgaattagggcttccactttgggacgaagacaggaagtgtattctttcaatgattaacgaacaaagcaaataggtttccggataactgacagcccggaaagacgggcgggcgattagttcagtcaggtagaacaggcgaaacttaaccataaaggccattgtccccggttcgaatccgggatcgcccacggtgataacattaaacaataaatgatatgaaagcgattagagtttcagtgaattttcgcgaatggtcgaaagtggatggctttttaggccagttcaagggagaagaagacactttcatctaccaagtggaaaacgtgacgtttattgccgtgtttggcggtgagtgcgcgatgtcttacttcaaggctgaattggccaaagcgtttgatgaagaaatccttattgtagaactcagataaagacaagattatggaaacaataacactaaataccctattacgggtgatggacatgcaaacattccgtgagttgaagaacaggggcaaactcgttattacaaagcctgccccatatacagagatacaactttcgtctataccaaatcgtcatcttcataaactgaccgacgttcattgacagaggaaagatagaagtaatcatgaaattgcatgaaaaacttgattgtacgcaagatatcctcgtggaaaaaattgtcgttgacgtatgatattttgatggtgaaccatcttttcttctcgtcataagactcaagctcaaaccataaggcaaatgcctttacaaaggctttggcgtcttcaatctcaaattttgggtcattgtagtccaagtgtttgcccattgtgatagtagtacaattgtaaaattcagtatcagtcatattattggaattttattggttagacatgctacaaatgtagcaaaacttccgtggttcgggagaatagcggaagacttttaataacaacggattaaaacagatataacaatgaagaaacgaatcgtagtagaacatggagaagtaaaacggattgccttgctcatgaattgcacttccgaaactgtatcgcgtgcgctggcatacaagaaagataccgggctggccaaagcgatccggaaaatggctttgatgcgcggaggttccgaagtgggtgacgaacctgtaaacaatggaaatcatgaaagcggactggttaaaaccgtttagcggtgagatcgcctggtggcgcagccttaccgggaaagagaagttatataccgtttactttctgctgagttttaccttgttggttggaatggcggattgtaatccggtatgggtgatgtttttggccgtgttgaatttcggcaactctgcacggctggtaaaaagagtgccgatcgataaactggaagattattaaccggtaaaacaatcgggaatggaatattacaataaaatattgtgcgtgacatacgaagaactgacatccggggatgatccggtgatcaagcctaacacgctttacagtaatgtccgccggggaaatatccaatgcgtcaaccgtggcggcggcgaggggaaccacgccctgtacgtctattcctcccttccccccaaataccaacaacgttttgtcgccaagtatggcgaacccgaagagatcatgagaagagagatactgcgcggacgtgtccgcaaagatgagaaggcggaggacttcttcgagaagcaccgctacgacaagaacggtgagctggtaccgcttccggagccgacgatcacggcctatacgctgaacgcctcggtgctgaatacgctgatcggcgatatcgcccgcatccgtcccaaccgcaacaaactgggcgtatcaggcgactactgggaggagataatgaaacggagcgaagagctgcgctcggagttcggccatacgctgcccggctgtgtcggacggttgaaggaactgatcaagcggtacagccccgaccattacgaggcgctgatcagcgggaagtatggcaacaggaacacgctgaagattggcgaggaggaaggacggtacatcatcgcgctgaagcggagccagatgcccaaatataccgaccaccagatcttcgagacctacaaccgcacggccccggaaaggggctggaaaccgctcaagagcgaacggggcatgaagggctggctgaacagcccccgtatcaaacctctgtggcacgatgccgtgttcggcgaaatgcggacacaccagctctacgaccgcaagcaccacacgttgctccccgccagccgggattccctctggtatggcgacggcacgaaactgaacctctattaccgggacgaaagcggaaacaaacgcacgatcaacgtctacgaggtggtggatgcctacagcgaggtgttgctgggctaccatatcagcgagcgggaggactacatcgcccaataccacgccttccgcatggcgatacagcgcagcgggcacaagccttacgagctggtgtgcgacaatcagggaggccacaagaagaacacggccaaggggttcttctcgaagatcagccggatccaccggccgaccgccccctacaatggcgagtcgaaaacgatcgagaacatctttggccgtttccagcaacaggtgctctggacgcgcttcggctacacggggcagaacgtgaccgccgtaaaggccaccagccgcccgaacctggagatcatcaacgccaatatcgacgcgctccccacgctggacgaactgcacgagatctacgaggcagcccgagaagagtggaacgagatgaaacacccggccaccggtatctcccggatcgagatgtacgaaaacagcgtgaacgaggagaccgatgccgtcagcgtgcgcgacatggtcgacatgttctggtacacgaccgagaagccctcgaccttcacctccagcggcatcaagatcaccgtgcagaaaaaggactatacctacgaggtgtatgacgaccagggcaatccggatctggaatggcgtcgccggaacacattcaagcagttctatgtgcaatacgatccgaccgacatgcgcagcgtccggttgctctggatggacaaaggcggagcattgcgcttcgagcgcgtagggttgccgccgatctatatccaccgcgcccaacaggaacaaacggaagaggaaaaggcgtttatccgccggcagcaggaagccatagccggcgagcgtgtcgaacgacagattatcgccaaggagatcgaatacgaacacggtgtcgctccggaacagcacggcctggtcagccccgacctgaaagggctctccaaagaggccaaggaacagcttgaccgccgtacacgccagtacagccaaccgaagagacggacgcttcgggtatcattgggtcgcgacaccaaggaattgagtaacgtcacctgggaccagctcggcggcaacaacgaggtaagcttgagtaacgtggcaggcaaactataaattaggaatcataaatcgaaaatcatacaatggaagcattaagcaacaaacagaaagacgccatccgcgaggctcttcgcgcctacgtcgccaagtatcccagccaaaacaaggcggccgggagtttgaagaacacatcggtcggcacgatcagttgtatcgtgaacggcaagtatgaaaacatttcggataagatgttccgcgacatcgccgcacagatcggtggcggaaagaacgaaaccggctggcagatcgtcgagacctccgcctaccaagagatcaacttcgcgctcgacgatgcccagcgctggcgcaacgtcacttgggtggtgggcgaagccgggtgcggcaagacaacgacggcccgcctctataccgaagaacacaaagaggtgttctatatcctttgttccgaagatatgaagaaaggagacttcgtgcgtgagattgcccggaaggtgggtatcaagaccgacgggcacaacatccgcgaggtgtggagcctgatcctagacgacgtgatccagatggaagctccgctcctgatcttcgacgaagccgataaactgaccgaaccggtgttccactacttcatcagcatgtacaacaagttggaggagaaatgcggcatcatcttcctctcgaccgactacatcgtgaagcgtatccagaacggcctgcgctaccgtaagcccggctacaaggagttctacagccgcatgggacgcaagttcttcgagctggaggccaccacgccgaacgatgtctattccatctgtgttgccaacgggctgagcgaccggaaaaagatcgacgaggtgatccgagacgccgaaccgtgcgacttcgacctccgccgcgtgaaaaaggcgatccaccgagtcaaacggatgggcgagtaaacaaccgttcgaatgctatttgaacacaattcgaaaacaacatgaaacgagcaataagcgtccgggacatcctagacaagaaatatgagacattcccctttgagggaaaatggaaagaggcgttcgatacgcccgagaaccggggtgtctggttcatctggggcaattcgggcaacgggaagacctcgttcgtcatgcaactctgcaaagagctgtgcaaatacgaccgggtggcgttcaattcgctggaggaaggcacctgcctgacggtgcagaataacctacgtcggttcggcatggccgaagtaagccgccgcctggcattcatcaaggaagacatcccggcactgaaggaacggcttgcccgtcacaagagcttcaacatcgtggtgatcgacagtatccagtacacgcaaatgaactaccgcgattatatcctcttgaaagaggcgttccctgacaaactcttcatcttcatcagccacgcacggggtaaaaaccctaaaggtgacgcggccaccagcgtgatgtatgacgccgacctaaagatctatatcgagggctacgtagctttcagcaaggggcgttacatcggcgacaccggacggtatgtcatttgggaagagggagcacgtgaagccggtttaatctaaaacgaatcagatatgaaagtaatacaaatgaaacccaaacaaggctacgcaaagcccgacaattacgccgctttctacggcttgctgaaacagatgccgggagcgagcaaggaagagatcgtgcttcagttcacgaacgggcgtaccgacagcctgcgcgaaatgtcgctccacgaatacaacgaagccatccgtgcgatggagaagctgacacgcgccgaagagaccgaggccatgcgtatcctgaaaagcaagcggtcggccgtgctccaccagatgcaactgtcaggtgtcgataccgccgactggaagagggtcgatgccttctgcctcgacaaacggatcgccggcaaacggtttgcccggctcgattacgaggaactggaggcattattaaagaagattcgcgctatccgccggaaacaaaaggagggggattgacaatggcacgctatatacccctacaagacaaacttgatgagatcgaggaacagggcggacgcctgcgccgccgtctggactacctgaaaggcgagcgcgactttctggtcgacacgctgctcacccggccggtgaaggatatggaggcgcaacgccggctgctgcgggagtgggacgaggagatcgagaaactggagcgatccatcgactacctccgccgggaatatatgaaatacaaagaaactcagaataaacagatgtgtaacaattcaaaaaaagaaaaaacatggaagcaacaaaacaaacagtcgaaatgacggacgaggaactgagacagtttgaagcgttcaggaaagaacaggccgccaaacgagccaaggaacaggccaaacgtgaccgcgaggcctacaaggaactggtggacgaaacgatcgaggaggcgatcccggacttgcaagcggtcagcgactgcatcaagaccgtgaaaaacggcgtactgaataacttccgccgtgtgatcgacatgaagtcggaagtcttgaagttgaaaaaagacggccaacgcacggacaccttcaccaatacggcgggggacaagcgtatcaccgtagggtattatgagaccgacggctaccgcgacacggtggaggacggtatcgccatcgtgaaggagtatatcgaggggcttgccgacaacaagaaaacgaaggcactcgtaaaaatggtactccgcctgttggcccgtaacgcgcaaggaacgctgaaggcaagccgtatcgtccagcttcgcaagatagccgaggaatcggaagacgagcgtttcatggaaggcgtgcagatcatcgaggaagcctaccaaccggccatcagcaaacagttcatccgggctgaggtcaagaacgacaacggggcatggatagcgataccattaggaatgacagaggcatgagcaagcaacaacacgcgctattgatccagccgccgctcttcccgaaagagtgtcctgtcgaacgggtcgagttcggcggcttcccctgtagttattgccacggcaacggctggttctggggagtggatgattacggagagcgcatcaagcaggattgccccgtgtgtaaagggaataaacgtctgaaggcggtcgtaactatcgcctggcagccggatgaaacaggtaagaatagataatcaaaatgaatatgagcaacattttaaacaaattcagaagaaaaccggcggaacctgtcaaaacggaatccccggcactcaaacgtgaaaagacgatcccaccgcatatcgtggtctgcaaggtctgcgagggtaagggaaggaaggagggtacgatttgcccgcagtgtaaaggcaccggtcgggtaatcgtatcgtgcgaggtaacaacgtatgtatcggcttatatgccggaagacgccacataagagtggagggtcgcgtaggcatacgggaaaataaaaaccgccttctttttcgagttatcacaaatacggaggagaaggcggttttataaaaaatactgaaggtatggactcaaatgatcaagcaagagctgttccgagataaatcggagcagatatttgtaataaagaaagtaggcgtatgaataaaattatttttggcttgataggcctgaccggttacatattgtttcttgtcgttctggccgtagtggcttttagaattaatttttggcttggacttcttgttgtctccattgaaatgatggttacatgtgctattgcagtaaaagataagataaactaacaactaaaaaaatatgaagataagaaacaatgatttgtcaaacagaagtattgatattgatatagctgatggcgtttcaattcatctttataaatgtgagtatgacgagtttatcaaacttcttttacctgatatggagcaagaaataaagaatgcttatactctccaacatagagcaatagaaaatcgccaaaaatgctgggagatggtaaaagaaattcgagaattattctacgaatgttccgatgaagggttctgcgtccggaaaagtctgggtgaaatagatgaaaaaaaattagtagaagtgttggaaaaataccacaagctattaggttttgtttaattctaaattaaatagatatgaatatagataccgaatttaatgtaggagacggcgtatgctatctaagcggggataacattgtccgttcaaccataagcaaaataaccattgagatatcctatattgatgatggttttcttatggtttataaactgtctgacggccttagtgtgcccagaaacaattatcccaaatgggataaaagacttttcaaagacaaagagagtttgataaaatatttatctgaatcataactactaaagaatatgaatatggaaccattgataagattggtgggattagaggggtgcggtggtgatactcatgcttatttttcccgtgataaagaaaatgtgaaaaaagcgttggaattggggatagcctgtaccggagcggacgataacggagcctataacatatattttaatgactctggggaactttgttgtgagtatatgagatattgtgttaccaaagagtttaaaacagccgcttctattgaagaggctgttgaatggatggatcaactaatgaactaaaaagacatggatacgacaacagcacgtcaaatgggtttagtgcccagcgtttcccaatgtatcaaggacgcagagggatcagcggaattgattaaagaacgtattccacggttaagaagtcggattgccaagcggcagagtgagagaagccttgagtttttcgaggctgtggtctatcatttgaaacgattacaacatctagaagcagaaaagaatcaataacgacataagagtgatggttaaaaacattttgattcgcaatctaaccgtagatgacaacaggatgttgcaggagataaaacgtgaaacaggtcaccaacaggcctcaagagccttgttaagaacggggcacgattatctccgcctccttgaaacaagcgggttacaaagggaaaagattgctatacttgaagaggagaacaaaaaactccgacaaagctccgtggcgattttaaaagcggttgaagatatagaaagtgttatcaaaaacaacatataaaagcgtcctataagaaatatgataacattacaagagaaaggtccggaaatggttgtaataactttccgggccttttatctttgttcaaacaaaggttgtttggtttatctgttctatgggttatcaccggaatacattaaaacgcattgcgcttgtctgcgacatcgtgaggcggcattatgaaccaggtaggcgcgaccgctgctacaaagaggtgtggcggcggtacgtctatccggtttatccgatgtgctaccggacgttcttgaattacatcggggtgaacatccaccaagaacgtacccgcaatgaagaccggcagttatccctcttctgattccaccgcatacccggtcgtgaaagtcatcgcatattcgcggatcgcgtcctcacggttgtaacgggtgacctcctgctgctcgatatcgttgaaagcatcggtaccgaacccatacaggcaattgcccacctgttccatcaagtcgaagatagcgagtgcccggctgcggtgctgttccggagcggccatgttacccgtgagaacgggacagtcggcaatacggatcaggaaggtcagccgggcacggcgcaccccccacgtttccgactcgaagccgatgtggctcacgctgatcagcgcgcaaggaaactttaccggcggggcttcgttgtaataatccatctgtccccagtcttcgctgacgtaagccagatcgggaacctgctcttttagccgccgcatgacggcttccaaaatctctttcatgatttatgatttgtaatttatgatttgaaggctcgcttagcctcttccaatgtcttttcagcattctcccgaaccacttccgcggcgatttcccttatacggggatgctcgccgataaaggggcgggctggtactgaaatcgtccgcctgatccgtttggcgagggccatacggcggaacttctcttcgccgggtttgtcaccctgttcacggcgttcacgggctttcgcccatgcccagcggcgcatcttgtcggaggggacgaagtcctgccgcaccgtgccgccgtagttctgtaatccggcatatttcaggctgctttcataaatcaacctcgtgccgtctatccggctatgcagactgcgccggagggcaccggtgcgcatcaacatcgatccctccgacggattgtagttcggactgagcggtgcccacggccggtcgaagaaggccttccgctcgaagttgcggtcaaattcgtcatccagctcgactttcaggtcacgcatgacattatttaggaaatcgttgttgttcatattgatatgttttgtatatttgcggcggttctaagccgaaaggccgtgagcccccttctggcagatttgattacttcaggtctgccagtcgtattttaaagccctccgatacgatctcggcccgtgtcagacttacatctttcccgtttatcacgatcgtaatggtccgtatgttatcagaacggcgcacccttgaacgcaaggcggcactcaaatcctcaatcgatatatccgaatcgatccaaagcacgatatggtcggcttggttcttggcgtcccggatcaatcggtcgatggagttcttggagggcgtctggctgaccttgtattcctcctcataccccaacgtccggttgtagctgtccgccgatttcacgccgtccgggttatccagcaggtcgatctcgtagccgtatttgttggcgaaataagagccgacccggatgttttctttccgctctcccttgccatgcccgctatggatacgaagctgtccagcggtggtcggtaccaccatatattctttctcccccggatgaagggcgtcccgtaccgcttcccgttcgcgttggcttacgtcataataaggatggtgtttcggaaatacgacctgttgcttgccgggattgaaacggaacatctcggcacggttcacgccgttctttcccgcttggtaggttgcctcccgtccctgctggatggcggtcacgctgtccgattcgggatacttgcctttgcgcacctgtaccaccgtacagcggcatcgccatccgtttggcgggaagaactcctcccagaagggatcagaggccggtagcgtcacattgtgcagtaccgcatgttccggacgaaccttgctatcgtgcgcggtacggtattgcaggttgtagcggtcgccgtccgcctcaaagtccttccatttggcggccatttccgaggaggcctgggcgaagagatattccgctttcagccaatggcggttataatcctccttgatcgccgttatatcgttgtaaaaacggttgaacggcttcaccgtcccatcttcgtcgcgcaacaggcgggatgcctccctcaatccctggtaggtcttgaatccggaaaagacaaagatatcctccttgagcttttgcgctatggcctccggaatcacgccgctctccaaagagggagcgatcgccccctcatacgccccggcatacgcgtccaccaaggcacggaccttcggctccgccagcatctccgccgtgaaaccctccctgcggaatatctttcgcagggccgatttgaagacacgctcgtcgatagcgggtatgtcttcgttaccctcggactcaaaaggagtaagaccgtcccggtacaattcattgatccgtgccgtcagccccgattctctttcggggctgatccgaaaaaaccttcctgtccggatgatcgtttgccggtcacctcgataccgaacttgtccttgatccaagtcggatcgatctcatagtattgcatcgcttgcgcggtacgttcccacaactgtccggtgtcctcttccgaattgaacgagaaacgcaagccgtccggaagaaaaccgatccggaagagcgccggaaggacgatggagttcatccagtcctccacctgccgtttatcggaattgacatacttctccagttgtttgacacccacttcctctttcgagcggttgccgttcttggtgtcctgcccgatctgcgccccgctgatgagcagcgacatctcggagttgcaaagagagatcaggttgttatacacatccccgttcgtactgacaccttgggcaaactggaactcctcggtggtatcgatgataaagtaggccgccgaccccatgtcgcgcagcatatcctccgcccggtcgagcatcgccggatcttgcgtgttggtcttgatgtagcggggcggtatgccgtagatctcgcacagctccgaccagcacgagtgggcgaacttcttgaacagggcgtgcggcaccgccttgttcaacagcccgtagttaccgggcgcgccgaactccacgacataggtgccgtattcccgcagttcccggtaatacgccccctcgtcggcggtgctgtcatagaggagcagcccctgttccggtaccacgttctgccggggtatcagcgtcacgccgataccgtccgtttccgaggtggataactcgaccaatgaatggccgtagaaaaccgattccaacatataacgtaccaagagcgggaaccagaccgccgacgagagagtccgggtggcctcctcgtccaccttgcccgaagcgtctttcagactgaactccaaggagagcgtccggccgatgcgctgctcgatctggctggtcaggagcgcgtcgagcatcacgtcggcatacaggtccatcaactcccggcggcgggggcggtctacgctgtccgcctggcggagcgcgcgccgccagctgtcgaggtctttcctgacacggctgatcgctttgggcacgattttccgcaccaatccctcccgttgcttaacgaaagtcttttgtggctttttagagccttttttatgtttgggtatatacttatccattttcatgtttatctcttgtttttaacgggttttaatagcgttttaacggtcttggaaattcaccacgaatgacggaacttcgggttactgccgaagcgtaccgcgccgaccggattcccgccgtcttcccggaggggaagcccggacgggatatcgcccttcatcagctctttcaggtaggacatatcccggtcgtaggcttctttcacccggctgtagaggatgtccacgttgcagcgccggatcaggaaccacagggcgatgttcttgcagatctccaacagttccgcgtcccgctcgttaccggtggcggagaagaccttttccacgtcataccgtccggacaacagacgcgtgacccgttgtaccgccgccagcatacaggcctgaacgatcgtgtcgtcgtaatcggtgatctcctccagcttgtactcggcggccaccgtcttcatttcttcaatctctaaaaacatgactgtgaattatgatttatgaattatctattgcttaatatttccggcttggacgtttgccgacccgataggttccggcacaggccatgctgcgctggttcaacaggaacacggcaccttccaaggcatccggcgcgtcatcgtgtacccggctgcctttctcgaacatcaagagctgctccaccaattgcgtcatgccgggtgaatccttctctttctcgttcaggataatcaagccacgctcgaagaggggctgcatcgcctcgatacgcgagaacttgtccggcttcttgcgcccgtcgccccggatggggacctggtggccgatagagtctcccaccttcttgaactcgtccagcatcaagtcctgtatgaagttcgactccatgtagtacatcaccgggacacgcccggcgatatagccgtcgatgtcgtaatgccaggcgaccatgttggagacgctggtctggtccacgtaggctttcaggaggtggtattgcccctccttggtcttgcccaccagcatggtcgccttgaagtcgttctgcgtcgaggccttgaacgaggggtcggtgtagcagatcaggctgcggtattctctcaatggcaacattttcccgtagcggatatgtttgcgcaggaaaaccgccccctcgttgacgggattgttcatgtattccttttggaaccgccgttcacccatgtaggtgcgcagcttcaagatctcctcccggctgtatttctccgcccaggagggctgaccggacgcgtcgatggcgttgaccaccgtgtggtgcgtctccggacgttcggcgaaacggctcaggatgctgtccttgccgatccggttcccgaccagcacgaaccgcccgcgccccatgtccatcgcgccgagcagggcggtcaggcaccagtcgaacgcctgcgacacacgcgcctggttgcgtaccatctcgtcatcgtctatatcatcgatcacgatataatccggacgctggccccggttcttgataccacggggggactggccccggccgatggacatgaagagcatcccgtccttggtcttgaactcgccggtgctccagctgccctcgtcgatctgaatgttgaagtccgctttcagaagactgttgaactccagctcgcattgcaggtcggaaagcaagcggtcggcgctgtcttccgatttcgataccaatatcatcacatggatggagcgtttctcttggatcatcaaccagataggaatcatcagactgatatgggtactcttggcgtggccgcgggcccactcgaagacggcacgggtatggggacacgtcttcaggtacttggccgcgtctatctggaacttgccgcacttggtgatacgcccggtctccttgtcggtacagaggtgcgggaaataggtctcgacaaagaatgagtagtccttacgtgccatatcggtgcgagcctctacctctcttgatgtgtctgacaggtgaaaatcataagagaggatgagattttttcgttcctcccatcttttccatttctccttgctcagtttgttcttagccattgttaatgcgcattaaaaggtacttgtcttgatacttggtgagctgctgtacgaacccggtcgtgatcgccttgtccgacgcgctttgctcgataatccagtcgccgaatttcgtcaagatgtcggctacatcgtccaaggtatatccggacttgattttttccagctgacttgccagtttcgcaaactcgtcaccgttgaaaccctcctcactgtcaagcatctcattgatcttcatcaacgtcttgttgatgatctggtcgcggctgacggttcgggcggcgcgtttcaacccccaaccgccgtcctccttccacttgaccagcgtctgctggctcacgcctacccgctcggcgatctccttctggggaaccttctgcatatacaggagataggcgtattcatacttttgcgggtctttcacacggatgcccgccttttccttgtttgctttttctaccataagcgttctttgtttccggcaaagttcaagtgaattaaagtggctgaaaacaagagtgtaaagaatttcacccctgttttcgttcccggaacgctcccggtaatttcgccctcaaaaacggatcgcacatgaacgaagacgaatatgcattgaacgatgagagcgtggtgaacagtcacggttttgtcctcctgaacgccggcggacgctttgaacgttacaacgagaatccggtgatgcttttcaaccacgagtccgccagcctgatcggccagatgaccgctttgagggtagaaggaacgaggttgatcggcaaggcggtctatgacgaggaggacactttgggggcgaaatgcaaacgccaggcgaagaaaggttttttaaaaggatgcagccccggaatcatcatccacgccgtggaactgcgcaccctgccgaacggcgaggagcgcgtgacggtgaccgactgggagctgtgcgaagtgagcctggtaagcgtccccagcaacaggaatgcactgcgcctgtacaccaaacaaggcgatatcatccccgacgaccgggtagaactaagcgtcgaggcattgttaaacatcaacaaacccaacaacaacgaaatggacaaaatcatcctgacagccgaggcgtatatcgcgttaggcttaaaaagcaacgaggcggatggcaagtcgatctccgccgccatcatggaactccagtcacgtgccgagaaagccgagaaggaactggacaaccaccgtaaactgaaagcgaccgaattggtggcgttggccgtcaaggagggccgcattaccgccgataaaaaagaatcgttcgagagactggcacttaacgattatgacatggctaagacaaccctggaggccatccccgccaaggaatccctgtcagccaaggtcacccattcgaccggcaggacagccgtagcggatgggcgtaaggactggacctatctcaaatgggccaaggaggaccccgaaggattgaaacgcctgaaagcggacgatccggaggcgttcgaggaattgaagaaacggattaaataaccattaaacaagtattttatgcctatagaaaagcaaatttggatcgccatgttgatggaagggttctatcccgaccgcacgttcctgacccgttcggtagatatgacaccgatggtggaatacaacaaaatcaacttggccgaagccggtgtcgctccagatgtattgattgataacacggattatcccgtggagaccatgagtcgccccgatacaccgttggatttaccccttcacaccttcgatacgaagaacacggtggtgcgcaacgtggaggagatggaaacggcctactccaagatggagagcgtggtgcgtcagcaccgcaataccttgcagtcgaagacggccgcctacgccgcgcataactgggcaccggcgaaacacgccgaattgacaccggccaaggaaacccttgcgccgggtaagatttctttcgaggacatcctaaaaatggatgcctggttccgttcacgggacatcgacccggccacattggtagcggtactgaacccgtaccacttggcggacctgcaactggaggatatgaagctctacaagacaatgctggagtcgaaccgtttattcgggttcaacgtcttcaccttctccaaactcccatattacaagcaagcggacggtacgaaagtggcgttcggtacaggggacgcggaggcagacgcgcagtgctcactgttctactccgaccaggaggtgatgcgcgccgacggcgatatcgaggtgttcgccaagtacaaggatccaggcgagcgtggcgacgtgatcggtttccagaaacgtttcacggcactgcctatccgtaataagtaccaggcggtaatctataacaaagcgtaaccgatggccaaactcaagcaattagtcatccactgcaccgccacccccgaaggccgtgaagtatcggcggacgagatccgccgttggcattgcgcccccctcagtgaaggcggccgcggctggagacaggtgggctataccgacctgatacacctcgacggtacggtggagcgactggtggataataacgaggacgacgtggtggatccctgggagatcacgaacggggcggccggacataactccgtctcccggcatatcgtctatgccggaggggtcgccgccgacggtcgcacccccaaggacacccgcaccccggagcagcgggaagccctcgccgcctacgtgagggacttccaccgccgcttcccctctgtgcggatcgtcggccacaacgagctggcggcgaaggcctgcccctcgttcgacgtcaaggcctggctggaacaaataggtattaatcgataaaacaaataaagctatggactggaatatcgttctggccatgatcggtacaggtgggttgaccggtttggtgaactggctgatcaatctgaaggtgaaccaaagtaaagcccggttagaccaggatgatatattccgtgagatggcagagaagaacaatcaatttatcgcgcaactgatcaatgagaaagaggaatggcaaaaacaatgcaacacgttatccgagcggttcgctctcttggagaggcttattgtcgaagaggccaagcgttgtcggtcttatgatacttgccctgttcgtatccggttgcaaaagtacaagggagacaactatctccagcgtaaccgacctcctcgcgtgggacagaaaggtcaccgccaccctcgcgacaatcccgtcgagcctggcgacgctgcgggtgccgatcgacagcctccgtaggctgcccgaaggagccacctacacccaaaaggagggacaagccacggcctcggtcgggctggagggggaaacgatcgtcatccacgccggatgcgacagcctacaaacgctggtcctctccttggaggagagactgagccgggcgcaagaggagctggcgaacaccttaaaggtgaaagagcctccggacatccccttttggacgacgctcaaagggtatttgaccggtgttctggcaggcctcgccctaggctgggttctcgcccgaaaaagaaatcaagactcataattcaaaactcaaagacatggcagaaacaaacaagacaagatccataggcctgaaggtcgcccagttcggcgacgtgaacccggaaggcggcatgcccgccgtaatgaagcgattggcgcgcaccttgaagggcacggcctcattcacgaccgaggcggataccacgaccgacttctactgcgaggaggaacccgccgcgcccgtggagagcgtggggaacgagccggggttgaaacaggtcaagctaaacttcctggaatgggacaacgacaccctgaaggaggtgttcgggggcacggtatcggacgccgaggacgtgaccatcgacgggaagacctactcggtgacaaaataccaggccccgcgcgacatcgtgacggtacggaaggccgtccgtgtgatctccatgcacggcgtggtgatcgacatcccgaacgcgcaggtgaccgcccgtttcgtctggaacctgacccgcaccgacatcgcccagatcgaggtgacggcgaaggcgctggccccgatcggcgagaacgacggcccgtacgccatctacaagctcggcgagcctaaacccggcgtgtgatggacaaggtagagatagaggccgccgaggccctgctggaccggcggctcaagatcatcctcccggcgccatggcccttgcggatattcggcaagaaaaccataggatattggatgaaacggccggtcggcagcaacgtgttccgtatcgcccggcttttctgccggatgaatatcgacataaagaggttgatgtccggtgatatcggcacgttgatggagtatatcgacaagcacggcgtgacggcgtcgagactgatcgcctacggcatgatccggggatcgatgtcggcatggctgctgaaccgcccgctggcctcatatatccgttcccacatggggatgcgcggcatggcggagttgatgaagatcgtggtgttgacttgcgacgggtcggatttcgtgagtattatcgtatcggcggcgagcttgaggctgacggagccggtgacgagccaaccgacagggaaagggagttaaaggaggcttacgagcctccccatagcccgttcggacaaatccacgcgctgatctccaccggggcgttcacgtacgacgaggtgatgaacaagatcccttggtgtgtcatcttgatgatgatcaacgaccaaggacgtatgagaaagagatccggggaggaaaacgttatccaaaccgaggaggaggaactggaattcttaggactgagataaaatggcgaacgatcccgtatacataacattcgagttccgggggaacctggaggatgaggtcgagaaggtgactctcggcatcaagggcctgcgcgacgagtcggcgaaaacctaccagcgtttgatcgccgacagcggcgcggcctacggcgccatgagcgccgagaaccggaaactggccgtcaccgtacaggagagcatcaacgccctgcgtgacctcgccgtcgtgcagggatcgctggatgacgggctggaggccggcaccgtcaccacccggcaatatacgcggatgaaggcggcgctagcggtgcgggagaacagcttgcgcgaggcgatcagcggtggcatgcgcacgctgaacgagcggatacagacggaatcgagggccgtcgattccgtcatggccctccagaaacgcctgcaggagctgacctcggcttactataacctatccaaggccgaccgtgagggaaacgccggacagggcatcctgagacaaatcggcgacctcgacaaggagatccagacggcgcaatcccgcctgtccgcctacagccgctccgccggtaccgggttcaacggcctgtcgatgtcggtgcaacaggtggcccgggagttgccatcgctcaccatgggggctaacatgttcttcttggccatctccaacaaccttcccgtcttggccgataatatccggaccgcgcgggtcgagtatgacctgctgaaaaaatccggacagacggccatcccggtatggaaacaggtgctcacctccatcgtgagctggcagacggcgctggtggtggggatcacgttgctgtccgtgtacgggaaggacatcgtcaactggatacaggggcttctcggggccgaccaagcccagaagaggttgaacgagagcatgaccgatttcaactccatactggcgacggagcggcaacacctgaggactctgttctccgcgttggagaagagcacggccgggacggagggtcaccggaaagccatcaacgagatcaacacggcgtacggcaagtatcttccgaacctgctatcggagaagagctcactgaatgagatccgtgaggcttaccggctggtcaataagcaactcatggagaacgccgccctgaaagcccaaagcggcgctatcgacaagacgttggagaaaaccataaagacgcaatccgaggcgttgacggaaatgcgcgagatcgctaccaggaacctgggtgagtccaaatccggggggatcatggatatcatccccggccttacggaggatttccgggccgcgggcaagacatgggaagaggcatggcgagggatatccgccaagatccggagcgagctcggggggaagaagctcggaggctccttctacgaggagttggaggattacgtgaggagcgtgtatgaatcagagaaggagatctctgatatacaaagacgattctctccgtttttcaacaaggaggccgccgagagagatataatcgagaacaaggcctattgggaggatatcaaaaaacaagccacttccgtgctggaatccatcgacgcggaacaaaagaaattacttgattccggcaagaccgacgggatcgagcctgccatcatcaccgcctacaagacggccaaggcggatatagacaaggcgacggaggccttgaaggcgtacgactcgtatgagaagagacaatccgccgcggacaaacaacagaccaaggagcaacgggccaaggaggcggcgaacgtgatcaaggccgagaccgccacacgtgagctggagatcgagcggcagaaggccgtcctggaacaaagggagaaggacgccgagctggagcttcgccagcaaaagatcgacctcatgaaagagggctccgacaaggaactggcccaaatcgccttggactatgacagaaagataaacgagatcgggaagaaaggccgggaatatatcctcgcccggcagaagatcgagcaagacctatgggagaacgagaacccggactggaagaagaaggggctcacgttcaagccctccacgacctccgtctcccagctacccggcacgcaggccaaggaactgtccgacgctaccgggatggcggactcgacccgggacaaggcggaggccgatctgcttgagaagacattgagacaataccaggactacgcgaccaagcgtctggagatcgagcgaaaatataacgaggatatcgcctacctgaccagccaacgcaccgagaagaacaaggaggccatcaacgccgccatcggcgaggccgtgaaaggcaagaaaaaagccctgtcaagcctatctctcgatgagctgaaggatacggacatgtgggacaagatcttcggggatctcgataagatggccctcccctcgctggaaggattgctcaagcaagcccgggaggtcaacacgtcggcgtgggatcccaagaacgtaaaggagtaccaggatgccatcacccggctggaggaggcgatccgtacccgctcgccgtttaaatcgatcggcgatgactggaagaagctgctgaaggcgatgagggagggggatggcgacggtatggccggggcccttgagaggatcgactcctccgtccaaaagatcaacaacgacctgaacaccatagccggggggatcggtgacatcttcggggatgaggcgggttacgccgccagccaagtggtggaactgaccaccgccctgggaggtttcgccacggccgcctcacaattcgcccaaggagactttcttggcggcatagcgagtgtcgtgtcaagtgtcggttccatattctccatgggtaagaaagtaaaggagatgaaccgggaggcccgggaggaacaacagaagttctacgacaaggcgatccagggcgagatggagtaccaacggctgttaagggaacgcctccgtacccagcggcagatcggcgagacgaccttgtcttacaacaaacggatcacggaggaactggaaaaacagcgacaagcctccgggagcgagtacgaccggttgctgcgacagatccaaggggagcaatatatcagcggcgtaggctaccgccacggcacgtggttccggaaggcgaagacgtggaacgagtattccagcctcgcgggcaagagctacgaggatatagagaagctctataccgagggcaagctggaggagaaggtggcgagattattcgagcagctccgggcattgagagaggaaggtgtcgatatcgaccaaatgctggatgaccaggaggagtcgatgcgggaggtcctaaccggcaccacgaccgacagcatcgcggacagtatcatacagggcttcgccggggggaagcgatcagcgaaggatttcgccgacgatttccaagagatgttgaataacgccgtcttgcagggaatcaagatgagagccttggaagagccgctccggaaatggtatgagtcgttcgccgaggcgagcggggcgggattgacggaaagcgatatcgcagacctgaaagcgcaatacgacaagatcgtcgagaacgcggccaagcaactggaggacatggagagggtgacgggcaacaagatagactccaccctcacccaacaggccagagcgggcgctttcaccacgatgacacaagacaccgccagcgagctgaacgggaggttcaccgccatacagatcaacgtgagcgagatcaaggggtgcgtcctcgacatgcggacctttctcagcaaggggcttgagtactccgaggagatcgcccggaacacctcctattgcaagcggctggacaggatcgaccggacgctgttggaaatattgacaaacggattaaaagtaaaatagcatgagggaaggcaagctgtatataaacaacctggacgcttacgcgacatacggcgtgttcctggccaatgaccggggcgggacgtatgacaatctctccgcgttgatgacacccccgcccgtcaagaaatacaccaccgtcgattaccgggaacgggatggcgaggaggtggacgtgacgctcccgaggtacgaggcacgcgatgtctccctccggttcgccatggtggcggagagcgagctggatttccggacgaggtacaaggcgtttgtcgatgtcttgagatccggtacgctcaacgtgcgtgtcaccgagacgggaaagacatacaggctctattaccagagctgtccgggcatggtgatgaggacacggctccggacgaccggcaggctggcggccatgtggaccgtcaagttcagggagcctaaacccgagttttaacggtactaaaacgttgtttaaatggaattgaggatatacgatcaaacagggggcttacgggccgtcatctctccggatgacagttccacgcaacagaaggccgtgatgggggacaatacgctgggcgtatccttcaccaccggcgaggccatacccttcgacgtgaacgattacgtggacttcgagggtgagcgctatacgctcatgtccgtcccctgtccccgtcaggccagcacggtcgagtatgaatataccctccggttccatggtgtcgagaacgagttgtcgaaggcgctctgcttcctcatgacggacggcgggatggactcggacttcgccctgacggacggtccggcgacgcatttgcaactggtcgtggataacatcaaccggatcaagggaagcacggcctggaggatcgggagcgtgatcgccgccgactacaaggtcatcacctatgacgggatcgattgcctcacggccttgaaccggatcgccgagactttcgagacagagtggtggatcgtcgggacaaccatctatctgggcaaatgcgagcacggggagttgttggaactgggctacgccgccgacgggacagccgtaggaggcctgttgaacatgagcaagcgggaggaggagaacgatagctttttcacccggctttacgccaagggaagcacccgcaacatcgatcgctcaaggtacggttccgattatcttcacctgccctcgcccttgagatacctggagaagaacacggggtacgggatcgtcgagcgggaggtgatattcgatacggtctacccccggcgggtcggtacgctctccggcgcacgttccatcgagcgggaatccgaaggcaagacaatccggatctattacgtgacggacaaggatatcccctttaatccgaacgagtacgagatcgccgggctgaccaagcacgtcaagttcgagacgggcgagttgtccggctatgatttcgagatcaattatgactcgtccacgggggagttcgagctgatcaaccaatatccggacgagaacgggcagataccgggcggggtcatgatcccgaaagccggcgacacgtatatcctctataacatccgcatgccggacgagtactacgccttggccgagaaagagttgaaggagacctccgaggcttatctggacaagcatagcgtggacagctctgtttatagcggtgacagcgacccgatcatcttgagaaaacgggaggtcaccgtcacgctcgggcaacgtgtccggttatacaatcccgtgttcttctcctccggataccgggatagccgtatcatcggttttacccggaacctgaacgatccttacgacgtgaaagtcgatatatccgagtatgtcagtatcggccgcatggagtccctggagaggaaggtggactccttcctcccgatgatcagccaggccgggggatcgatcaacatcatcaagagcggtgacgatacggtcccgacggacaataacgtgttctcggccttaaaagcgatatccacattcttgcgcaaggaccaaccggaccaaaccaattacccgctcaagctgctaggcggcttgatatcggataacatcgagtcgcaggatttcgccgccggtcctttcggcacgggtctcgtcttgaaacggaacgccaagaccggaaagtcctacatggagatcgacgagttgtacgtgcggttgaaagcgtatttcgatacgcttgagatcaagcatctctcgcgcgtgggagggcgaatcgtcctttccccggcggggatggaatgtatccgtgtggagaaggtgtcggcggagtacgagatcgtatatgacagtatgggcatgcaggtatttgattccaccggcgaggagatattggccccgatggacggcggggaaatggcttaccggtgttatttcaggcaatccgacggtgacaaggagatcgtgaacgagttcgccgttgacgacctggcgcagtgccgtgagttcaacgtgaagacgggcgtgtcccataacgtgagcaaccaatattactggcgaagggtgatccatgtcggcgaggattacatagatctttccatcacggattgcgatactggaagcacggaaccaaaggcgggagatacgattgtcaccataggaaacaagacggataagaataggcaacatgtcgtttacctgtcctcctatgacgaggacgctccttgtttcaagctgtattccgggatcaattcctactccatgttgaacaaggaggtgacggtgatctcgccgaacgccgacaagaacgtgttcaccggcaagatgcttatcaagccgggttccaccggtttcgagaacctgacggacgctccggatatgggagaggtaaacgaggcgatacaggacgctaagaacaccgccaacaacgctcaggaagcggtcaacggggttcaagggtccgtgacgagcctcaagggttacgtggacggggctttctccgatggcatcatctccgaggcggaggcaaaatccatagagaaatatattaatatcgtcaacaacgagaagatctcggcggagtccacgttcaataagctatactcgaacccttacctggaaggttccgccaaggtatccctatcaaacgccaggtctagcctactttcctcaataacggcgttgaccaactcgatcaacagcgccatagccgacggtaagacgacggtggcggagaaggcggacgttgataagaagttcgccgccttcaacacggcgacatccacgttcaagacggcggtagagacggtgaacgagtccatccagtccaagttgaagggctgttccgacaaggcacagcaggcggcggacgaggcgaacaacaccgcttcctccgccatggaaggcgtaaacgaggccaagggtgccgtctctgacctgaacaagtacgtggacggggctttctccgatggcatcatctctgaggcggaggcgaaatccatagagaaatatatcaacacggtaaaccagacgaaaaaagagacggacagcacgtatacggccttgtacattaacggtttcctgtccggtatcgccaagtcaaacctgtataccgccaagaatagcttcaacacggctacctcaaacctgatcgccgccatcaacgccgccatagcggacggtaaaacgactacggctgagaagaacaacgtggacagcaagttcacggcattcaataacgcctatgcctctttggcgacagcgatagagaacgccaacaaggcgatacaggacaagatcaagcaagaggcggtgaacgagtccaaggacaatgccagctcgcagatacagggcatgagccaggaagttaaggatgatttcgccaagaagctcgggtataaggactacgaggacctggtaagcaccgcgtatacgggaaacaccatcatagatccaaatacgggagtgtttaatacccgcttgatcgaggctagcgtcgtgattacatctaaattactcgccgacgctatcatgacctccaccttgaacgtgaataataacctgtacatagagaaggacgggagcgtaaggacaaaaggcggcaatctggaaatgatcctcaccaaagggtacctaagggggctttataaagacgtggaacgcttacgcctcgtaatagacgaaagcttgggagattctgagttatacttgaccgacagggatcgttccgcctcatacaggaactcgggggtaacatacactttgaaaagcggaaagacattattgcttgatcccgaggagataggatcgggtgtcatctatgcaaggtcagacgggactctggccatcaaggataaaacgcaagaatatatctctgtatacataagagtctccccctcaggtggaggcacgacctcgccggcggcaggatcctatatggtcaaacagggatcgagagaaatcgtatcggcatcccccgcctcgggatacagatttgacagatggtctgatggtggatcgcagagtcatgaggtgctttgggatttagggaaaacgttgacagcctatttcacgaggatagagacaacaaaatatactgttgtgcttttggcttccccagcatcagggggaaccacgtctggcagtggaaccttcgaggccggaacagtgcgtaccgtatcggcgacagctaacccgggataccgattcatccggtggagcgacggcaaggcccaaagccatagcgtgacatgggacagcaataagaccttgatcgcttatttcgaacgttattccgtatccggcgatgagatcttttccggaacaagtctgaccagcctctcgtactggaaaacatatggaggtgtcaatgttgagcttagcggaggcgtggccgccttgcgattcgggacagaatttgcatatgcgtgttttaacaggggatatctggggagtaagctggagcaaggtcatatatacaggttatctatggaaatgaaagtattgaacgcgtcatcggagtctcaaattactgtagccgtagggttttatggttatgttgatgaatattcgaacgatcctggggaaaatatttcctctattggagcgatcaaggtcacgaccagttatatgagctatgagttcgatcttaccatgaatgaggatgcgacgataaagacatccttagcgatcatgagcaataacaatgttttctatatacgaaaaatatcactaaaggaaatatagatatggaaaaggtattgatggtattattactgttggcgctcgcgggatgtacggattacgttccggagccagtcccctataagacaggggaccgacacgataacgacacgataaccatcgaggtggatacggtcatgagggagtatgattttgacataaagatttagagtatggtaaatgataacatatcggtgatcggaagctggatcaagttcgccttgtcccttgaccttccagggagcctctcgatggatgacgtggggttcgaggccgtattttacatctatggcaacaagacggtggtgatcccaaagtccgggatgatccgtcaagatggcgatacgtatatccttgtccttgacacctcccgtttggggacgcatggccggataaagtgccaggtccgggtggatatcccggacgctaatgtcgagtctggcgtaaggactgagataatacggatcgatacggatgagatagtgaggaatggcgtgctttaggggacatatcataaggctggaggtcgtccgggcggagcttcggaggatcgagacgatgagcgccgggctcaagaggatcgggcggatcggagtgaggctatccaaggtctgtagcgtggatgacggcgtatggctattggtctcccccgcggatccggtatgggtggccgaggatacgccggcatacctcacggtacactcgaatacggattggaatattgaataactaaaaaaacaagaacatggcaaaagcggcatgggcggtggtcaccccgccccaaggatcgggtgacaaggaggtaagcgtaagatcaggctcagagcataccgggcgtaacgcccgtacgacggtcctgacgttcaaggcggcgaattgcgccgacgtggcacggacggtgaaccaagcgggcaagcccgagtacgtggatatagcggacacggcatcatcggagaagacaggtaaggtggttaccatatcgggtatcagcaactcgaggaaattgaccttctccctcggtacgggagacctggacatagcgctacccgataattatacggcgaatagcgtacagacgacgaacgggacggcgatagcgggcgatcccggggccttgtcggtctataatttctccatcgccgtcacggttccggcgaatacggagatcgatcctctcacgagacaggtcatcgtcacggacgagggcgggcaccaggacgtgtgtttattgacactggccgccggtgacgcttacctgcgggtaacagagggagatatccaactggactatcttggaaccccggtaacggtgaacgtggagtctaacactgactggaccgtggagtgatggaaatcccttggataacaggaaagggcaatatcgtcgtgggccttgcgggaagcggcgatggtcaggcctcattctcctccgatacggagaatgatgatgttgacaggtcgcaagaggtgacgatcaaaacgacccggggcggtaacgtggaggtcgtacgtactgtacgtcaggcgggcatgagggaatacctgtatgactcacttggcgagataatcaaagattctgaagatgtggaaataaaagtattgaaagaaaatggctaatttgatttatacgataacgaagaccaacgatcttctggagaaggttaacaatatgccggatagcgtggcggatggcaagacaccggtgttggagacgggcacgactacgacgttatcacccacggagtccgccacgtccgaggtcgtgcggaacggatccgactcaaacgggaatcctaaatacaagataaacctcggtatccccaaaggcaaggacggtaccggaggatcgggaggtggcgtggccgactccgtggattggagcaatgtcctcaataagccgggttgggtaaattccacgaccaagcccacctatacggcgagcgaggtcggggcgttaccatccaacacgacgatcccatccaagacgagccagctaaccaatgatagcaagttcgtgaaggatacggaccttaagacgattaacgggcaatcattgataggtagcggtaacataaccatatccggaggatcgggcgggggaagcgggaacgtgagcgtatctaacgccgccgccttggtgacaggaaaaaaatacgcgttcaccccatccgccaacggcgtaacggatggctcgttctccgagatagccaatgctagcaacgataaggatgggttgatgagcaaggctgattattctaaattgaatggtctcaaggatgggatttcacttcccgtgaacattaccaacctgtctgagacctcctccagtgaggatatcatatccttgttttctttagatggggtctctgatgcgtttttaatcgctggtatggcggccatgtactcaaatttaccctcgatggagtatgcggcggatgtcatggatatatacataggcaattacaaatgctttgttgatgcctcgtatgaagattcaaaatgttcattgtccttgacatacgtggtgtccggcaagctcaagaccatcaagataaacgggacaaataacgggaatgcctggatatactcttgcgagatccaggagagcggggatgatacctattatctacctgtcgccttgttggatctgaaagcgggaacccccagcagtgagatacatgccgccgccggaggaagtgacgaggaagctaggataaaagacgctatcaaggcaagaaaaaaaatatatatatcaaagaacgaaccgactggcaattactcgatcccggtctcggcaagtctggttatattgaattatcctttccttgtatttgatatgccaaaatctatggcgggggatgggggcatctcaaaaacaataagattaacgccagtggcagaatgtaacgttagttataaaagaggatacaggctaagtctaagcctttattcacttacaggtagttcggcttccgatgacatcggaacggccgtgggaggagaagccggcctaaaagaaatcatccaagccgctaaagatgggaatgttttctttatcaatgggaaatctgataatattaattatagaacggacttatccgtaaatatattttcggaagatgctaacggcgacttatcaatctcttttactggttttggctatgcgttatgggaaggattgggtggaatgatgatactgacatatacaaagtctagcaatacgtttggagtgcaaatcatggcgatctcataatcgatatcagcgacaacacttagcggtatggatgattccaagaaataagagcgcaataatttatcattggtaaattaaggtctagaaatgaaaggattgaagctatggtttagctgttgattttatcaggcaaccttaacgcctttatcggggggcgggcaaataaaagcccccggctgttagtaaagacgccaatcacatactaacaaacaaatgcgagacaccgcacgaccgggggctgtatgccttcagtcgcgatgtctcgttttgttttatgtgattggcaatacaaatatactttaatttttggagattatgacaatatacgagatactttctttcaataaggaattgctccagcgtctatttaacgccggaataaggacaagcgattgtttgtatgtcgatttgttcgatgattatacccgaatgcgggcggagggtgaaaagacaacctatatcgtggccgtcctttctgacaaatatgccttgagcgagcgaaaggtgtacgataccattcgctatttatcaagcgactgcatgggccgtgcagtgcaagatcaggcgtaaattcgttcactagatagtttggttctacctttgttccaaatccttaaaacgagacaagtatgggcaagtacacttacaagccgcaatatggcgtgatcgtcatttgcgcggatgaaaaagagcaaaaggagatttatgagcgtctcctgaaagaaggtctaacacttaaagtggtgaacgtatgagaatagaggtacaacaccattgtagcgacttcaacagctatcgggccgcacgggtaaaaagtcttttcaacgcggagaaaggctgcgactgggaaaagacggtagaactacccatcgaaaaccgggtatggcaaatcggactgattgtcggtccatccggtagcggaaaaaccagtattggaagtaagattttcaaagaacctatttatgacctctattccggctgggataagaataaacctattgtggattgtatcgcccccgatggagactttaacacggtgacgggtatgctttcagccgttggcctcggcgatgttccagcgtggctccggccgttccacgtgttgagtaatggagagaaattccgggcgggtctcgcgcgtttggcgtgcgagcgaccgcggcatgccgtggtagacgagtttacatcggtcattgaccgacagatagccaaggtcggggccgccgcgttctcgaagacgtggagacgcggcggcgggcagatcgtgcttctttcctgccactatgatataatcgaatggttacaacctgactgggtatatgataccgcggaggcacggttttacgaccgtgactgccttcggcaacgtccaagactcgaacttcaaatttataaagtcaggggaactgtattcccaaggttgtttaagcggcattattatttagaccttcctatgccggtcgcagccgagtatttcgttggctttgtcggtggtgagcccgtctgtcatttagcggtaacaccactctttacggcaaaggcttaccggtccacccgattggtagtacttcccgaatggcagggaataggcgttggcactaaatttttagcggccgtttgtgaatatcatcttcagggacatggtagatgtggtaaaccttacccggtgttctttcacacctcacacccgcaactatgtggagcgttacgtcactctaaaaagtggatacaaaccggagcacatttatatggagttaataaagggcgcagcgcggcttcgatggcacgttcggcccaaaggttaaataagtctgatcatgcggcaaccggttatggcggccatttcagggcggttcaggcgtttaaatatatagggaatggtaattaaaatattgggaaattgcgggtcggaggcattcaaagcggccgaaatgttcgttaaggcaaaagggcatacgctttggtgtgaagggtatcgttgtgaccttgccattgcgccactccttacggtgaaagtttccgatgaagaactgaaagaggcgaactggggtacgttgatattccatccgtccccattaccttatgggcgcggggcatcatctatcaaatgggcgtataaacgaggggaaccgataaccgccgccacatggttttgggcagactccggctatgacaccggcgatatttgcgagcaggagatagtaaaaatagactatgatgcgcagcctcgcgtcttttatgagcgagaaatcattccggccatgatccggacgttaggacgttgtttggataacatcgggaaaggcattatacgtcgcatcccgcaagtagaagcctattcgacatacgataaaaggctataacaatccatcttaactaccttgtaaaggtacgaaaaaagtatggaataaacaactttagtagacgcttttttaccacagccggcaataaaaaacggtattcaaatagggttagaagtccatttgaatgccgtttatttttatgtataaagaaggtgttttgctttgattttgcaaataggcggttactttgcggattaaatttgaagcacatttcgtttttgtttcaataaacgcatttcgtttttcacaaccatcacgtttcgttttgcgggatttatatcacattctccttttcctccccggcggtaaaacataccttgccggtaactacattgacttccgtaacggtaggcttctcatctatctggaaacttgttcccagtaccgtaacttccgtttggctcgtttccactgagaaagggcgtgcctcattcctcgtcacttggaaaaaggcctttccattcatctccacggcacgcctctctttatcatatctcttcgcgtcataccggatccatgaatcgccagccaaagcgaccaaggtactatccggaagataaacatctttcatttgtccgggggcggtagtaatcgcaacccaatccggggcgtttctctctaccgtaaaccatgtccccagacctacgagcactaacacgacagcggccgccccgatccaataccggcgaaacgagaccttccggctaatcgcatgctcagaagcgaacttctgccatgccttatccgggtcaaggcttccttcccgatagcgtttcgctacgaaacggatgcgttgttccaatttattgtcatgctcgttattattcataactattccttctatttaataagtccttccagtctcataccattggaatccgacatttggggcctgccccttcttcaatggaactcccacactcatactgggcgagatcctagacgatacgcaaaccatcgctttcatcctattttctctttaaaatgtgtatcccaaggtaaaactagccgtatgatagttcagacctatgttataagcatatcccttgtattgcttatctatacccagatcatagccaaccttaaaagcgacccgtttcacctctataccagcctctatggtagctccccagtcaaaacgaggcgctaccgcatatccttggccgggattaaacgggttatatgatatttccttattatagggcagctttccttttaaagaataatcactttcctcatacgtcacttttcctcccaagccaaccgccaaatagggaccgaccgccaaatgtaaccgaacatccttacttacctgccaatcgaaacgagccaagatcggtaattggatatattcacgatgctccttctgactgcgatgccttataccttctacatcaaaatccttaattccataggtatcataatagaagcccgtaaagccgtaaccattaccataaccgtatccccacagattcaaataatcactggaaacgggatagagaaatatactcgtaccttcccgtcccccatatggactctcactagttccataaatctcactataagaagacagccccttcccccgtcgcacataatacaaaccggattgaagcgagaaccagcccgatccgaatgtataagagaccgcagccccagccttaaagcctaccttagcgacatctcccttatactttgtcacgttcataccggcttccggcgtcactttccattgcgcttgggccgagatcacgcacgtcatcaacatcacaaataccaccaacttcctcatacactctccatgctttaatgaaataaacaagtaacctttatctctaagacagagaaatatgaaaaacccccactcctttctataaaatttatccgaaaaagaacatataaacacggatagcggtctctcgcaaagctttcaatgccttgctcatctggttctcaaccgtttttaccgataaattcaattcctccgcgatctcttggtatttcaagccatcccgtttggataacaagaaaatcttcttccgttcgggaggtaaccgatcgatagcgtcccacaggcgggcgtcacgctccgatcgcaggatgtcttcctcttccgaggtatcttctacgtcgggtaactgctcggtggcctcagcgtttacgggttgtgaggtaaatgaaagagaacggttcctcaccgcttgatataaataagccttgagattcccgatcacattaccagcccggttcttatcccatacatccgcgaaggcctgttgcacgatatcctcggcatcgtccacctgatcggtataacgaagcgcaaacaaacacaagggcttatataaactcttgaaatgatgttcaaattcttgggtggtaatagcagccatacgtttgttatctgtaactattcaccgcaaagtaacaaccttttctttttaacaaatcgcttttcaggttctttataatggttttaataaaaagaaagcgtttaaggacttatccctaaacgctttttcttatttttaattaataagcatcaatatggacgaaaaccgataatctggcgtacctcatttaaagtcttagaagcgctctcacgagctttctccgcacccatacgggctaccttatccagatattccgtattggcggccatatccaagatacgctcacggatcggagcgcagaacttattgatatcctcggccaactgctttttcatatcgccgtaacggatctcgcaattgttgtatttctcattaaagaaatcataggtctctttctcggagacaatttccatcatcgtgaataaattggcgatcggctcgggcttcacgctattcggctcggttggtcccgcatcggaaaccgctttcataaccttcttcttgattgttttctcatcatctatcaagtagatcgcgttaccctcgctcttgcccatcttaccggagccatccaagcccggtactttcacggacttatcgcccaaatggaacgaagctggttccgggaagaaatctactccataggtagaattgaaacggcgggcgaaacgacgagccatttccatattctgctcctgatccttacctacaggaaccttcaacgccttatggataataatatcggcggccatcaaggtcgggtaagtcaacaaaccagcgcttacgctatgtttattaccttcattaaaaatctccttctctacatcgccttcacatccttcccggctgatatgcaactgctgacgggccttatccttaaaggaagccgtacgcatcaactcgccgataccggcgttcatattcaaatatagatacaactctaccacctccggcacatcgctctgaatataaatggtagctttttccggatcgataccacaagccagatattccgagaggatcgtctttacgctatttcgtatattgtcaggatgcgggtgagtagtcaacgaatgccaatcagcgataaagaagaagcaattatactcatcttgcatccgcaagaaactctttaccgcgccaaagtaattgcctagatgcagattacctgttggtctgattccacttactactgtttccatgtcttgttatttttagttttcaagtggcggcaaagatagtaatattctcacaatatacatatattatatgccgcagatcctcctaaccacctattataacggtgggacatcccaatacgatttgccctccgtgagctgtcgtatctcccattctggcggcaggtttaccgcagatcatcacggtggaagatcctttaatgatcgtgtccggcggacctacgcaaacacaattatcccccattaccgccgccggtagcttgccgattagaacagtcggcgctcccggccctacgataggaccgcctacatggggtatcggtgatggccaagccggggtttgcataggacatgtatgcatatctgtcaatcttgctgctggaggcatatttattactttttagttaacgatttattgaaatgataatctacaaatatataatatttatcatgaatatactacttttgcgcgctaatatttttaatcatgaatgcaaaagcaaaaggatatgttctaggggctatcgccgcagcgacttatggaatgaaccccttgttcgccctacccttgtataaagccggtatgaatccggattcagtcctatttttcagatatttattcgcgatcccggtattgggtatcatgatcaaagcgagagggcggaactttaagttgaaacccaacgagatcgttcctttaatcctcatggggctgttggtttccttctcttccctagcgttattccaaagctataattatatggaagcaggcatcgcctcgactttgctgtttgtctatccgatcttagtggcgctgatcatggcgtttgtcttcaaggagaaattaacgttacaaaccatcttttgtatcttgctggcattaggcggtatcggcttactttataaaagtggcgacggaacgactcttagtttaaccggtgtcctgttggtcatggcttccgctctttcctatgctatttatatcgtaggcgcaaatcgtccgctattgaagaatatcgctacgttgaaacttacgttctatgtcttgcttttcggaatgaccttgtttttagtccgtatagatttcggcaggagccttcacattgtccatgattggtatttatggggtaacctgatcgctctagccatattcccaaccgctatctctttcctttgcacgacactggcggtccaatatatcggctccaccccgacggcgatcctcggagccttggaaccgttgaccgccgtattcttcggagtgactgtcttcggtgaatcattaacgttacgattgtgttgcggaatcatcctgatcatcctagccgttaccctcattatcgcaggaagtaacgtaacaagccacctagttcgttttcgaaagcttttcccaaggcttccgcttaagaaaaagaacgctaaatcataaaatcatatacaggcatcatttctagatactattctacggggctatcgcaaatctatgataaattcgtaaaatcattttttacaatcaattattttacatatgtttgcgataaacaatacgtatccaatcatgatcaccaagttctcaacatgcttattgttccttgcattgctcttaaatagttgccaacaaaggaatcaacccacctctccccaatatgaaccggaatataatcgttcgacgactccggccctcattgatatagaaaaggcgctggaccatccggcgatgttgaaactgagtcaaatagcctctaagctggaatattataatgttggagacgctcgttacacggtaacacaagcgatcgctattccggatagcgacgctttcatcacattcaataacccacgcatttattatcgtaagcaaggcattcccagcaaacgatatggatttaaggccttggattataaatggaaccatgggatgaacggccttaatctattttacgacaagaaaacaacccgtatgtactgcgccttgagcggcctcgaccaagacaataaaaaagattcgaccacattcaacgatataaggccatgtatcggggaattacccacattagatacgatgctgaccattcagaattatatattccccgaaaacctgcctaccaaatattcgataaatgcggatgccagtcaaatagtaggcttctcctcctcgggatatatgctttgtgattatgcggaaggctctaaaatcccgaaaggaataacgacattcaaccttcgaggagatacgctttgcaaattcatccttgcggatgccaaagatattaacgtctctccggatacgatcacccggtttcaaaccttttattggaatacggatcaagaccggatgaatttcttgattccttatcgcgatacggtataccagctttcaagttccaactcgatcacccctttatatgcgcttcataaagacaatcaagataaaccgaccggtcttcgttctttcttggagaatccgaatgggctatttatgggagtctttcaaaaaggttctcccgccatctataattggctgggatggctggacgattacaaaccggttatcacccatcgagtagtctatctcaagaaagagaagaaaacatacgccttacccaaaagctccggaggatttatcaatgatatagatgatggacttccgttctggccagacggacaaaccgatgactgtgtttatatgattcgtaccgtcaccgaaatgcgtgagaccgttaaacgcacaggctcctcccgccaaaaagacctgatcaaattcttagacgatcctaaagtgttcgagagggattatgtaatgatcgtggcaagaccttgatggatattcaatagataaagccaaacatccataaaggaatcatattgcggaaagcatactctatgtcatctttcaccacatacccatccgccgcttgcttgatctgttgccgcgtcttattctttcccccaatctcaaaggttcggccatctatctcaaagtctgaaatcgcagaagaagtaacgaagcatacgattcgcatccaagatagaaaaaccgtctcacgcacggaaccgatatccggtacctgctccgacaacgcataagccagattcgtattattcagatagatcttctctactttctccaataatttcaagccctgcgctttttctcgcagtaaattaaccagacctgccttctccaaataactcatgtagtcgggcaacacattccggctgatatccaaatctctcgccaacttcgtataatttggtttgaaagggacactttgagctaatacatataataatttcttcaactttacggcagaagccaccgtcatatccgcaaaaatcggaatatcagattccaccatttggttaatcacgctacgcagacgcaagagatattccgtatcttgaaaaaatggataataacctgtcgataaataatcattaaataatttgagtggacgagcttccttataagggaactcaaccttcccagcaagaatctcttccaacgaatacgatggaagctgccacccctgcgatatattcaaatattcccgaaaagaaagtccgggtaatctatactctaccttcctgcgacttaaatccgcaccacctttctccagatcaagaatagacgaacctgtatagataacttgaagaccaggaatttgatcgtatatattcttcacctccctagaccaatccttgtatttatgaatctcgtcaatataaagttttttcccacccagattataaaattgataagccatgtcgaataaccgatacttggtaaaatagaaatcatctgccgtaacatacaaagactcatcctcacgatcatacaatttgatatgctgcaacaatagggtagtcttcccaacaccacgagcacctaaaatcgcaaccaatcggctatcccatgcgatctgatcgtgaagaaaacgcacgacttctgtcgaagtatgctctaattgagttctaaaggaacgaaataaggtctccatatcgattcatgtttaaaggacaaatatacaaaattgcacgatacgatgtgcaattttgtatgaaaattgcacatcgtatcgtgcaatttcctttatataggttgaccatgttctatcctattgatgaacgaggtttacccggacaaaaataattaacattgtttgcacaaattcattcaactcacgatataaataggtgaccttagattggcaatcctaagagcaatactgacttggctaagtaatatatactgacttgcccgacacagtatatattacttagccaagtcagtactactgccgatagcaagctcatcacacgaataaaccatcaaatgaacgttgaaatggagaatttactctcccgaaacgatctttagtgaatatcctttaccccgagcactctctatcaccaaacccggaataggagacaaatcctctttaagccttttagccgtaacggtaagatgcacgaaaagtactatctaatgataatatctgaagtgccccccctgtataagaaaaacaaaaatcatccccaagttctttgatacgccgatctgtatcctcttggactacctgttgaaatgatagcaatacaaatacataactttatgccaacaaaccctcattttttgtctgtcagctaaaagtcagctaaaacaattggccatgaaaaggaataaacttatgtttgtgaaaaattaaatacgatatgaaacgagcaatctattaaaacaccgtccttcgcaaaaagaacaaataaaacgaatgaaactcttttggatcacgctacttatatctagtttagtctcttgtcacaatttcaaagaagacagacaactctcattcgctcttgaaagagcaggcgaaaaccgccgtgaattagaacaggtattggaacattacaaaaatgattccttgaaatatcgtgcagcttgctttcttattaagaatatgcccgggcattattcttattgcgggaaaatcaccaacacatataataaacaaattgactctataatacttcaaacacaaaaagaggggcgttatcatgatacaccttatcttgccaatcgcattgatagaatctctaaaatccacgagaacacctcattcccgatacaagaagacattcgtataattacagctgattttcttattcaaaatatcgagcaggctttccacctatgggaagatgccccttggagccgacatttaaattttgatgacttctgtgaatacctattgccctactctatcggagccatggatgtactggaggattggaggactggcatgtaccaacaaatagattctacgacattaacagaactcaacgacttcagctattcttccgatatgcaaaactcagcattttgggcttgtaagcatatcaatcagtttttagagaagaaattagttcctgaaaactcggtatattccattccgttcatagcaaaaacctccactaggagcatgatatcattcggcacttgtaatcaattctcgttaatagcgttagctatgatgagaagcataggaattcccgtcatgctagatttcacaccacaatggcctttccgctcgatggggcattattggaatgtacttttagataatacaggaaagaatctagcgtttggaggatgcgagacaaaaacagatccggatatactgcataaacctagccagaagatggctaaagtgtataggcgaacatacgctattaatcaagatctcgtaaagctgaatacaaccgaagaggtcgtgcccgacctcttccggaatattttcatgaaagatgttacctccgaatacatgaaaacttgtgatatcatgattccaacacaaaaaaaacgaaaccataaacatgcctacctagccgttttcgacaatcagaaatgggtacctatatgttacggtacacaaaaaggaaaagtttgttacttcaatgaaataggaaaagatattgcctatctcccactttattatgacaatcaaggtattcatcctattacagatccattcatacttgattcacgaggtagaataaaatatctacatgcagataccagtaaacgaaagaaagttatattatctaggaaatactatctcgcaaaacatattttcgattatgcaaaaactctcaccggaggacattttgaagcttccaataatccggatttctccgatcctgatacaatacatacgatttctcattggttattgtccgcagattctttcgagataaaacctcaaaaaacatatcgctattggcgctatgtatcagcaaaaaacaagggttgtaatctagccgaactcgctttctactcagacaaggaggaaaaagaattaaccggcacaatcattggaacaaatgcctcggttcgttacgatactatgccaatggataaatccaaagtatttgacaaagatatcctaacttactatgaagccccttctacggttgattatccatgggtaggcttggacttcaacaaaccggtatctatcaataagatcatttatacgccaagaaacgatgataataacatccacgcaggtgatctatatgagctattctattgggaatataaccattggatgtcattaggccaacaaagagctattgaatcaaagctaacctatacaaatgtaccagacaatgctctcttgttgttaaaagacttaaccaaaggagaagaagaacgcatattcacatatgaaaatgacaaacaagtttggtggtaatctttattattccatgagaaccatattaaattaattacaacaagtaggcaattttaattttatctataaataactgataatcagcgtgtaaaaaacatcattatattttccgaaaaactcgtacgtgtttttactaaaagtcgtacgtgtttctaaaaattcacgtacgtgttttttagaagacgaagtcgagaagaatataaacattcaaaaaaatacactaacccaccttgtaaaacctaccccaccacacttcagcacatagccatgcccccgagcactctcaatcaccagatccggaataggagacaaatcctctttaagccttttagccgtagcggtaagagcgtctttggacacacttccatccggccagatttcttctttcagccgattagactcaatgaaatatcctttatgttctaataaaatacaaaacagtttcagccgttgatttgccaattcgatacgatgcctatgataatgcaatacgccatgtgtttcatcgaacaagatatcttctgttatttgtatcatctctttaggtgcttcttgtagcggtaagatatttatccttggtcttttccatgtcaagacaatcgcaataacccagagaataaccattgccagaatccaaaatatatttcgcaaaaacacttcacctactatataaaggaaaggaaattgaacaaacgcttgtaaaacgatcgtccgattcgctccaaaaacaatatcttttaatggtatgaaagattgataaaaagaagtatctgaagagctacattccgtcttgtctataaaggtataacaagttacggtctgagccgaaatcgcatgttcatacaaagatgcacgaaaagcgctatccagcaaggttacttgaatcggattctccatagacaaacaatgttggagacaaaaatcagacttctcctgtgaagacatcctccgtgccacctccttattattcctcatatgtataatcgcatcggcagtcttgattgtaatgctatctcgttccaatcgattagcgcctgaataggaaaaacaaaaagcatcccctaaatcttttatccgcctatttgtatcatcttgaactgcccgctgaaataacgtttgagactcttcttgtaattcatactttacattttggtatgatttataaaaagacaacaagcaaatcatcgtcatcagaacaaatacactccacttccaataaaatttccaattttgcttctccataattattcctcgttgaaactgcaaagatacgttttccatccctttctacgaataaattcattcaactcgcaagatgaaagatgactataggtagacaaaaggcttatttttcaactgtcagctaaaagtcacctaaaaagattggctatccaaagaccaagccgtacgtttgtaacaaaaattagaaacgacatgaaacaaattactttcaagaaagctttcgctatcattttcatttgcgccttgtgtgcttcgtattttcttttgaaagaaggaaaacaaaatttctcagatcttactttctctaatattgaagcgctagcttccggtgaaagtggatccaaagattgttatatggctggctctctatcatgtaatggaggatattacaaatatatatacaaccgttaaaacaacacatgaactactacgtgtacatagttctattaataggtagtctggtatcctgttcggaatcctcacggcacttcccccgctacgaggattttcccgatgaaaaggtattaaatgcgcaggttatccacctagataccgccttgttccgctatccattccggatagcggtcaaagatggtatcgctattatcatggacttgcacaacgtagattatttcttccatgccttctcttaccccgaatgggaatatatgacatcgtttggcaaacgaggcgagggacccgaagaaatggtatcggcagattgcttccggtttatctccaaggattctatctggacgctcgatgcgaacaaaatgcgaacaacccggtggaagattgaacaaaatatgaacaacatcattcccgtagaaacgatcgatatggacaagcggctggttagggcattggacttttacccgatggaatcgggctttttagtatctgactacctcggtgaatatagacaaaagtggacagaccgagaagggaaatggattcactccgctaatcagatcccgaccgaaaataattatgaagacatcgcacgccctgcattggcgcaagcgtggcgaagcttcttcgactataatccccaaaaaggcatcttggtcatggcaacccaactaggagaggcattagaaatatacaacttcacagatactacacaaaccgtacgatacggacctaatggagaacctcaattcgcaatctcacaatcggagggaattccaacgggtatcatgggattcagtgatgttcatatcacagaccatttcatttataccgtatttcatggccgtagtttcaaagatatcgggcaggcataccaacgaggggaagatatcgaggatggcgggcgatacatctatgtattcgacctcaaaggaaaccccgtccggaagtacgtgctcgaccatgccatttatggtatcgacgtagatgaggatacggggacgatccttgccacggatgtaaacagcaacgatccgattctttcatttaaaatataacgacaaaatatcatgaaatacttaaatctaatcatactattattattccttctagcttgccaagacaagaaaaaagacgagatcaagcatttagtatccgaatggcaaggaaaagagatacgatttccgaaagacatggtctttgcacggtttgcaaccgatacggtagacttcaccctgccaaaatccccccacaaggtgctggttttcgtggattccataggatgtaccagttgcaaactccaactgcaccgatggaaagaactgattcaatacaccgactccattacccaaggaacggttcccttcctctttttcttccagtccgatgacaagaaagaaatacggtatctattgaaaaaagacaatttcgacaaacctatctgcatggatcaatcagacagactgaacgaactgaatcatttcccggccgacgggagatttcaaacctttctattggataaggacaataaggtcgtagtgataggaaatcctatccacaacccgaatatccgggagctatacctaaaagagatcaccggaaaacaacccgcttcacaaatacagaccaccgtgaaagtggaagaggcatccatacagctaggaactatccaaatgggagaaagcaaagaagctgttttccgattaacaaacacaggaaacaacccgttagtcatactagacgcggctacaacctgcggctgtgcccgcccatctttcgacaaacatcccgccaagccgggagagatccttcaagtaagagtcatcatgacaccgaaagacaaaggagtctttgacgagacgatttccgtgaaatgcaatacgaatcaactgataaaattaaacattcgggggatggctcaataaataaaagagaagggagagcttgccggatatattggaacgatcacaagcaagcctcccaccccacttttactcatgaagcagaaaggaggtgacacaaaagtagtaaattaaattgaaagaggaattcgagaatatccttatcttgcagaagaatagtaagcaagagattaaattctcaaaaacataaactataaaaaagaaatatcatgagaaaaaagattttaggaatagccgtaatggcagtcgtagcagtagctgcggcatggaacatcaaccagagtgaaaacgagattaaactctctgatttagcgcttgacaatgtggaggcattggctagtggggaaggtggaagcggatattgcagttactctgggggaggatgtattatcaaatattccgatgggacatccacttacataccgggacgttggaactaaaatttaatcaaaggagggtgtgccaaaacgaaaaaaatcacaatggaatacagtcggtaaatcaatggaatgcagatgttttctcattgatttttaatttgtatttcatagactctaggtatcttgagcaagaagaaaatgtgttcaatcccttaatttggcatgccctccttaaaaaatcagtatcatgaagaaatacattatcttacatctttcactcatcctattagtattcatcgcttgtaccgatgatcaaaaacaagatgacaaaaacataaccttccagagaagtgatttcaaagtccgaaaatcactatccggaaaaactattgaatttgacagtcttattttacgaccttcacaaatccaattattcgactccttcctagttacttgcaatcaaggggcggaaaaacaattccacatcttcaacctcaatacggcacataaggaaggagaatgtattcctgtaggacaagggcctaaagagatgatgacaccatgtttcgtcaatcggaacgattccgtagtcatttttgatatgatgacctctacgattttcacttactctatcccggaatttaccagtggaaaagaaccggaatacgccagccgtatctccctagatacaaaaccgctatggagcaatattcgaagcttgggcaacgggttcttaggcgtatcctatcaagagacgagtcctggattcctttttgatcaaacaggtaagaaaacgatggatttcggtacttatcctaaaactgagcaggagtatactcctgccgaattaatcaatgcgtttcgggcagacctaaccaccaaccgaaaagagaaggttgcaatcactcactacttcactgatttaatttgcatctataacgtgaacgggaccttggaaaaacaattacggggaccggatcatttcgcatctgttttcaaagaatttagggatggagacattatcggaagtaaagcgagcccgcaaacttatagagacgctttttatagtcctgtaaacgtggggaatagtttatttgttctttataatggaaaaatggtgacagagcctaattacaatatattatgcaaagaattatttgtaatcggatgggacggtagccttgaatgccattacacattagaccaaggagtctcctccatcgctgtagacaatcaaaaacggaagatctatggtatcagtgatgatccggaatatcatatcgtagtgttcgactattgatgactgatatccaaagaatttggatttaggaaatgaggcataaacataaaagaatgggaatagaaaaacgtatatacaaaacaaatataaatcagatgttacgatatctgacacttatattttatggggtatttggtattggttgcatatacgcattcctcctcatcttctgtttcagcacgttcaaaatcccttccgattccatggagcctcaactccaaaccggagatcaagtattagtaaacaaatggatagccggacctaggttattcaatattttcgcatctatgaaagggaagcgggtagatatatacagagtacccggagtcgggcaaatcaaacggaatgatattctcgtattcaactacccgcatccctattcatgggagcggatcgaaatgcacatcatgcaatattatatcaaacgctgcctcgggttaccgggagactccatccggatcgaacagggattctaccgaaacaaccatacaaaagagcctttggggaatgtggaaagtcaagcgaacttatccagacaaaaagcggatcggatgccggacggtgtctaccgttgtttcccttttgattctacattcaattggaatgttcatgatttcggtcctttgtatatcccccgaaaaggggatagaattaccgtgaatcaaacaaattataagctatacaaacaaatgatcgagtgggaatcaaaagattccctatcgtggaaagatagtaaagtttatataggagacaaacaggtaagacaataccagttccaaagcaactattacttcgtggccggagataagacagaaaactctagagattcccgttatctcggacttataccggaggaatttatcgtaggggtagcttggaaagtgtggaaatccgttgacccttacacgggggaatactgaaagggacgtttttggaaaaatattcgaaacaattgaagaattatgaataagcttattttatatgtatgcgcttggatctgtctgcactcttgcggtttctcaaaaagccaagaagaaagtatgttggaatatgcgttgtcgcaagccggcgataacaggaaagagttggaatatgtcatcaaatactatgaaggggattcgttaaaaagagaggccgcccgctttttgatacgcaatatggtctatcatttcggatatgagaagcgagagagggtatcagacatcaccaccctatcctcggactatctaatccgtaatatcgagctggcgtttcaggcgtggcccaagccctggaataaatcggtaagtttcgagaatttttgcaggtatatacttccctaccgggggttatacgaaccgccctccggtttacgtgaggagctgatgcggacgtacctccctttgctggatagttcgcatattgataacacgtacgatgcggccgtgaggttacaaaagatactacgaacccgagtcacctatcaaacggagatacccatccactatccaaccgcagaggagatccaccggacaggggttggacgttgtgatggggtagtcttgtatggtatccagctgatgcgtgcggccggtattcccactgtagcagaacatacgatctggactcgtaggaacggggaacattattggtgcgcattcttaaacgaggatgggcgattcctacctttcgctccggagtacgaaggcccggattccttgatctacaacctaaccaagccgttcttgaccccggccaaggtttacagatacggattcgcccccttacatccggtaacgaccgagtcgaccgatgaataccgtacgttcttaaaaaatccgttattgaccgctgtcacggagcaatacctaccacctgtcgcagatatccatacgacttgcgacctcccggtgagatcaaaaagagcacctatttacctctgtacctataatcatggtaactggaggcctttcgccatgagcgaacggatcggcaaccgctgtaccttcccgaagatcgtaggcgatgatgtgtttatcatcgccgaatatgacaaagaggcttatggctcactacgcttcatcacatcccctttccatgtgagcaatacggggatcatcacgaaaattaagcccgatccggcccgaaccgattccatctttatcgcctcggacaacccgtatcaacagcaagtgccgtatacactcgcttattgggaacaggaacagcagtgttttaaaaacggatatttcccgacagacacgatacccggtggcatcctcattcgcaagatacctaaagggagcctgttgaaagcgatgatctcgcgaccggaaaaggctgcggaagatcgtatctttttggtggaaaacggtacggtaaaaagatattaaccatgaaagaactgttgaaactcggcgtatataccctacttgggacacttttgctaagcgcccctttcgcaggattgggaatgctatccacacacttggtgacagagaaaaccttttggattcaactaatcaccctgttcttatccgccgtgtccctacaaggtttgtggttgaatccaagcaaggagctgtgcccatggacttacgtggatatcctccccctttccctcttggggcttatcctcctctcttatccctactccatacacccggagccggaaaagctcctgtttatcggacaaatggttgtcttgtggtatctgcttcggcaggtactccatgaatgtccggtgctcataggatatttttcaatgttctttatcgcgacaggccttatagaagccatctggggcttccgtcaattacagggatgggcctattcgaaccattccctgtttcggctgaccggctcttttttcaatccggggccttattccggatatttggcgatcacattaccggtggctcttggcatcttgctggaacagtccaaacgaaatatgccctattacctgtccatgggatgtataggcacagcgatcgttgtacttcctgcgggaatgagccgatcggcatggatagcggtggtcgtttcttgcgcctgggtatatgccctgtaccgccttgacaggaaacaggcagcgaccagactgagacaacacaaaaggtggtatatcataggcggtatcctaggcggcatattgcttcttggcgggagcgcatcactctatacattaaagaaagattcggcagacggaaggtttctgatgtggaagatcacgacgaaagcgatacaaaaacaaccgattacaggtaccagcctaggtgggttccctgccgcttacgctgaaacacaagcggaatacatggcttcgggaaaagcgactgaacaggaaaagttggttgccggatgcccggagtacgcatttaatgaatacttgcagattggattagaacaggggttagtaggattagccctatttataggctggctggggcttctattttataaaggaataaagaacaaaaggtatgcttgttgcgggggattgatgtctctggctatattcgccttctcttcttatccattacaattgccggagttttgggtagtattgatattcctaggggtgatgagcgtaacaccggacaaggatgagatccgtgagaaccaagccgaatcaaatggccatagatggggcaaacagatattttttatgggaatcgctatccttggaattggtttgttctggatgcaaaaagatcattataaggcttatcaacaatggaacaaggcgcaaatgtattacaaaaataaagcttacgaagcggccttggaggtatatgaacctttgtatccattattgaagcataaaccggaattccttttcgaggtcgctcaatgcctaagcaagaccggacgatacgagaaagcgaatggatatctggaaagagctgtcttattaagctccgatcccatgctttattacgtaatggctaaaaatgagcagtgtttaggtgaataccgacaagcggaaaagcacctgttacatgccattgatattttaccggaacgtatctatccgtattatctgttaatgaatctttatacggaaccatcttattttcaacctgcaaaattgaaaatggcgattgattccgtattaactaagaaacccaaagtggaaagttccgctattaaagaaatgaaagagaaagcacgaagtatgttaaacaacacatcaatatgaatacaatatccttatttttatagcaattacgactacatcgtaacaataaatacttatatttgcgaatgacaaattgtacaaaccgatcaatcatacgagtatgaaatactataaattgttgacctttacgcttttattctgtttaagcgcatgcggcggagaaaagaaagatacagataccacacaggattccgtagaaaccgtattgccggatgaggcgaacgaagtcacgatcatgactttgaagcaaacggaatttaatcatgagttgataagcaatggtaaactgtccgctcgcaagttggtggacttacaatttgagtcggcagaacccatcgcccgcatctacgtgaagaacggagaccgggtaaacaaaggacagaaaatagcggaactcgctactttccggctcacgaacaaaacagcgcaagccaaggatgccctagagaaagcgaggcttgaattaaaagacgtattgatcggtcaaggatatatgctggaagactcagcgaaagtcccgcctgcgacgctcaacctagcacgggtaaaaagtggatatgatctggcgctcgcccaatatcaacttgcccaatatgaggaacagaatgcgacgctaatcgcgcctttcgacggtattatcgcaaaccttttcgctaaacaagagaacgtggcgtctacgacggacgcattctgtaccgttatcgatcctcatagtctggaagcctctttcaccgtattggaaagtgagttgccgcttatccaaaacggagataaagtggaagttacccctttcgccaccaccagcttaaagactgaaggacgtatatccgagatcaacccgctagtggatgagaacgggatggtacaagtgaaagcggcggtaaacgacaaaggtaaattattcgaaggcatgaatgtacgggttagcgtacaacgctcgcttgggaagcaattggtcgtacctaaaacggctgtggtattacgttccggaaaacaagtcgtatttactttagttgatgggcacgcttattggaactacgtgcgcaccggactggaaaacgcggatagttatacccttttggaaggattgaaagaagcggatgtcgtgattacaagcggcaatattaatctggcgcatgagtcaccggtcaaggtaattgaaaattgagaattgagaattgagaattgaaaattagttgcgtatgattcgcttcctgctacaacgtccgatagcggtattgatggcttttacggcctgctttatcgtggggttggtgacttatttcaccataccggtctccttattgcctgatatcgccatacctgagattaccgttcagatatccggacaaaatacatccgcacgggaattggaaaatactgtcgtaaagccggtccgtttgcaattgatgcaagtggcaggattacgggatatccatagcgagactcgcgatggagcgggtattatccgccttagcttcgactttggcacgaacacggatcttgcctttatagaggtcaatgagaaaatagacgccgccatgaattacctgccccgtgaggtagaacgtccacgggtagtcaaggcgagcgctacggacattccggtgttttgcctcaacctcacactcaagacaattgaaaacgacgaggctttcctcgatctttgccaattcgcagaaacagtaatcaagcgaaggatcgaacagttgccggaagtcgcgatggtggatatcacgggcatattaggacggcaattacagatcgtaccggatatgaaactcttggatatggctgatattacgttaaatgatttggaatcagccttgtctgccaataatatagagccgggaagcatgaccgtacgggatggttattatgagtacaatattaaattttctaccttattacgtacaccggaagacgtacaaaatatctatatccgtaagaatgaccgaatcttccagataaaagatctggcaaaagtagctgtcgtaccggaaaaagaaaccggcttatcgctagccaacggggaaagggccgttacattagccgttatcaagcaagcggatgagaatatggacaatatgaaagaggcgcttgccgaggttaccgattatttcaagtctatttacccggatattgaatttacgatcacaagaaaccagaccgagttattggattatacgatctccaacctcaaacagaatctatcgttaggtttcttatttatctgcatcgtggcgatccttttcctcggggacgtaaaaagcccggcggtaatcggactaagtatggtagtcagtatcatcattagtttcctgttcttctaccttttcaatatgtccttaaatatcatctccctatccggattgattttggcattgggtatgatgatagacagttccatcatcgtgacggagaatatagcgcaataccgggcaaaaggagataatctggaagaagcgtgtataaaagggaccacagaagtaatcacccccatgcttagttccacatttaccacgatcgccgtattcgtcccgctggtatttatgagtggtatagcgggagcgattttcttcgatcaggcgtttgctgttacggttggtttaatggtctcttatttcactggaatcatgttactgcctgtactttacaaattagtttacagcataccggagatcaagcattcctttttcaacctgaaaataaacaatttgatcaaggagcatacgctggaccgattctatgacggaggggttgatttcatattcaggcataagaccactagcctactatttgtagctgtcaccatccccctttgcgcgatcctattctatatgatccccaaaagccggatgccggaaatcgatcagaatgagttaatcgcacatgttgaatggaatgagaacatccatattgatgagaatagaaagagagtcaccgaattatttggtgaggccgatcggttaggtgcgcaacacacggcctatatcggacagcaacaattcctgctaaaccgagacagggaattatccatctcggaagtagagctttatttcaagacagaagagaccgatgctatcgctcctttacaacaagaaatctccgcttgggtaaagcgaaattacccgacagccgtattatcgttctctccgccggagaccgtgtttgagaaactgttcgtaaccggtgaggccgatatcgtagccgagttctatgcccgtaacaaagaacaagctccggatgcccctactttgcaaaaactagagaaaacactagagagtaagaccggtctcgctcccgttggcgtagctttcgagaatcaattaaacatatccatagaccatcagaaactattactttataatatctcctatgaagaggtctaccgggtacttaagacggccttcaaggaaaatgaagtcgctactttacgctcttatcaacagtatttaccgatcacgctagccggaaacgagcaaacggtcgatcatatcctacataatacgttaatccgtacgcaaccggacgaaaaccaaaagacgaatcatgtccctcttagtgcagtaacaaaaattactcccggagaggatttgaagatactcaccgctggaaagaacggggaatatattccttttagcttctatcaagtagagaatgcggaacagttaatggaaaatattcgggagctcgtccgcagcgaatccaaagataagacgaattgggacatcgatttctcgggaagcttcttctcgaaccaacaaatgctgaatgaactggtcgtcatcttgttcatatccattctcttgatgtactttatcttagcggcgcaattcgagagcttcttgcagcccttgatcgtcctgctggaaatacctatagacgtagccgcctccttactggtattatggatatgcgggcataccttaaacctgatgagtgctatcggtatcgtggtaacttgcggtatcatcataaacgactctatcttgaaactggacgcgatcaatgagcttcggaaagaaggtgtacccttgatggaagcgatccatgaggcgggtcgtcgccgtctgcgcccgattatcatgacctcattgacaactatattcggtatggtaccgctactattcacgttcgatatgggtagtgagttgcaaaagccactctccattgccatgatctcggcgatgctgatcggtacggtagtcagtttatttattatccctttggtttattggtttatctataggagacatgcattatgaaaaaaagatacaagaggacattcctagttttatacgcgttctgttcgctattagccgaaggagtatcggcccaatcgctcgtcctttcccttgagaagacgatctcattggccgccgatagctcgctggaggcttttcgtacgaaaaacctattcttgtccggctactgggagtttcgtaattacaaagcggagcgactgcctagtcttacattgaatatcacacccgccgaatattaccgggatatcacgaaacgatacgattcagaaaaagacattgacgaataccgtaagcaacagtccttttatgcgggaggaaacttaaagatcaagcagaacttcgatatgctgggtggtagtttcttcgtggatacggatctggggtatatgcgctatttcggctcgaatacttataatcagttcacctccgttccaatccgtatcggatacagccaagatttattgggatacaatcctttccggtgggagaagaagatagagcctctaaaatatgagaaagtaaagaaagagttgctttataatatcgagaccgtcagcgagcaagccaccacttattttttctctttagccatggctcaagtagaatatgatatggccaaagaaaatgtagcgacaaccgatacgttataccgtaccggccaagagcggcataagatcgcggctattagtcaagcggatttactgacactcaagctggatgcgatcaatgcccgcaatacgttacaaaacgccgatatagccttgaagcgagccatgttcagtctggcctcgtatttgaatttcgataagaatacgaagatacggcttcgtctgccgtcacgcccccatgatatggatattccggtggatcaagcattgacgttagcccgggagaataaccccaagtttctggaagtgcggcaagaggtgttagaggccgagcaacaagtggataagaccaaaaaggaaaccttattcaacgcttccttgaatgctagtatcggtttcaatcaagtagcgacccagtttaaggaagtttacaagaatccgctgcagcaggacttggtatcgatatctatctctattccccttatagactggggagtacggaagggtaaatacaatatagccaaaagcaatctaaatgttacgcaaatatccgcacggcagacggaagtcactctggaggaagacgtaatcatgactgtcggcgatttcaatgtacagcaaaacctgatcgccagcgccgaagaggctttggacatcgcgatcatggcctataacgagaccaagcaacgtttcatgatcggcaaagcggatatcaatagccttacgctctccttgaaccgacagcaggaagcgcaacgtaattatatcacggccttgcaaaattattggttgagctattacaaaatacgtaagctcaccttacatgatttcgagacaggcatctcattagccaacgaatttgattacgagcatgggttctaagccgaacatatcatcctttacgatcatcgtcaccttcctttgtatcgcattggcggggatcgctttcgtgcctttattgccgatcaagctatctccctcccgtacgctgccgaaattaagtatcagctataatatgccctccaactcagcgagggttatcgagatggaggtaacctcacggttggaggcgatgcttgcccgtatcaaaggaatcaaagagatctcctcgacctcgggaaacggatggggaaggattactttagaactagataaacatacgaatatagatgccgcacgttttgaggcatcaacaattgttagacagacgtggccggaccttccggaagaattaagttatccgattttagagatgagccgtccggacgacaaggaatcacgcccgttcatgagttataccttgaacgcttccgctaccccgatattcatccagcgattcgccgaggatcagataaagccccggcttagcagcgtgcaaggtatttatcgtatcgatgtaagcggagcgacccctatggaatggcgcttggaatacgatagccgccagctacgggatctggggatcacgatagaggatatccaatcggcgatcagccaatattacaaaaaagagttccttggaaccgctaatatgggacaaggagataccagcaaggaatggattcgtctggcgttaatgccggaaaagatcacgaatgggttcgaaccatcgcatatcaccgtcgcaaacaaagatggtagcttaatccggctggatcaattgataaaggtaacccggcaagaagaggccccgcaaagttactaccggatcaatggtttaaactctatttacctgtctatccgtgcggaagagactgccaaccagttgcaattagccaagaaagtgaaggaagaaatgaaacatatccgcaccttgcttcctcccggttacgagatccataccagttacgacgctaccgaatttatccaagaagaattggataaaatctacgtccgtacaggcttgaccatcttgatcctcttgctcttcgttctgctgattacccggaatgtacgttatctgttcttgatcatcatcagtttaagtatcaacctgtgtatagccgtcatcctttattatttattagggttggagatgcaattgtactcgctggcgggtatcacgatctctctcagcttggtgatcgataatacgatcgtgatgaccgatcatatccggcaccatcatgaccggaaagcgttcttgtctattctggcggccactttgacgactatgggcgccctcgtgatcatcttcttcttggatgagaagatacggttgaacttacaggatttcgctgctgtcgtgatcattaatctggccgtatctttgttcatcgcattattcttggttccggcattgatcgacaagatgaatttgcaccggaagaaagtcgcttcttcttccccaaaagcccggagtcattggagacaacatccggtggtccgtccgatacggtcgttcatacaccgtttcccagtctatttctctcattattaccgggcgcagatccgtttcctttgcaattggaaaaagctggcttgccttattctagtactggctttcggactaccgatatttttattgccggagaagatcgagccggaagagaaggatctatccgcaagggactctttgtggatcgctcgctacaatgaattcgcggcgaaaggtatttggaaggaaacgataaaacctatcgtcgataagagtttgggaggaaccttgcgcctatttgtccaaaaggtatacgagggaagttattttacccggaatgaagaaacggtattaagtatcagcgcttccatgccgaacggtacgacccttgatcaaatgaaccacttgatcaaccgaatggaggcttacttgagtacctataaggaaatacggcaattccagaccagtatctataacgcacgtcaagccagtatcaacgtctatttcacccgtgagaacgagcgaagtggtttcccctacaccttgaaaagcagggtgattagcaaagcgttggaattaggtggtggaagttggggcgtatggggacttatggaccaaggtttcagcaatgatgtccgtgagaacgcaggttctttccggatcgagatgtacggatataattatgacgagttatacgaatgggcggaaaaactacgggagaaattgcttacgtatcgccgtatcaaggaagtattgatcaattccgagttttcttggtggaaggatgattatcaggaattctacttcaacttgaataaatcccgtatggcgcaagcggatatattgcctatcgatttattcgcgtctatccggcctgttttcggtaaagatatctacgcaggtaccatcgtcgttgataacgagacggaaaagctaaaactttcttctcgccaatcaaaggagttcgatatctggagtatgcaatatgtacctcaaaccatccgtgataaatcctataagttgtccgaactcgctatcgtcgagaaaagccagacccctcaacagatagcgaaagtaaaccagcaatacaggctctgcctgcaatatgaatatatcggagcctcctcacaaggcgagaagatacagaaaagggaacttagagagtttaacaagatcctgcctatgggatatacggctaaagcggaaaagaactattggtcatgggatcagaaagataataaacaatatgcgttattattcttgatcatcgttattattttctttacgaccagtatcttgtttaattccttgaaacaaccgctggcggtcatttttgtcataccgatctcttatatcggggtattcctgaccttctattggttcaaactgaacttcgaccaaggtggattcgcctccttcgttttattatgcggtatcacggtaaacgccagtatctatatcttaaacgaatataaccaaattcgggaacggatacccgctatttccccaatccgtgcttatctaaaggcatggaacgccaagatcacgccgattttcctaaccgttatatcgaccatactcggatttatcccgttcatgctaggcaccgataaagaagccttttggttcccgttcgccgccggaacgataggcggccttatcatgtctatcctaggcatcttcttttatttaccgatatttacgctgaaaaaagaacggcattaaacaggaatacgtatctttaacggataaatcgttaatcaaattcattaaacttatgagacacataaattatttagtattgcttctggtagcttgcagcgtaggtgcttgcagttccccgaaaaatgatacgaaagatgcttatccgatgttctggacttggttggattaccagcccggaatgaatttcgactccatctgtacgatcatgaatgaggcggggatagacggtgtcatgctaaacgcccctactccggatgattatcgggccgctattcccatcgcccagaaacatgggatagaggtctacgcttggttatggacgatgaatccggaacatgaccgagacgctatcttaaaagaacatcccgaatggttcagcgtaaaccgcaatggacaaagcttggccgatacgaccgcttacgtggattactacaaatttatgtgccccgccttacccgaggtacgggagtttatcaagaagaaaatagaggcttactgcgaggtagagggtttgaacggtatcgctatcgattacaaccgtttcgtggatgttatcctgccgactaccctttggccgaaatacggtatcgtgcaagaccaagaatatccgcaatgggattttggttatcacccggccatgatcgagaagttcaaggccgcttacggatatgatccaagagaacaagaagatccctcgcaagacgagaaatggctccaattccgttgtgaccagattaccgaggtcgctaatatgatcgccgacgtggttcactcttacggcaagaaaatggcagcctctcctttccctacgcccaagatggcatccaaaatggttcgtcaagactgggggaaatggaatctggacattgtcttccccatggtataccataacttctacacggaagatattagttttatctcagactgtatgatagaggatgtccgggataagaacccgaaaaccacgctttactgcggactgatggtagccgacgatatagagaatgccatggatgccgcactgaatcatggggcggaaggaatctctatctttaccgtatccgctttgcgcactccggaaagccgtgcgatgttcaaggcttatgcagatagtgttcgtgcggttcgtgccgagaacaatggggtgaatccggctttatccaagagcaccaaagtaacgaatcctttcgagagcatggatatcttgaataggataaacgcaaagatcaaagagctcgccaacgtgcctattccgaatatcgccgattataaattggtgaacgaaaaaggtgccacgaaatactacgaggtcaaagagctgaacacaggaaagacattctgcgtagacttttacttctacggaggtattctttccggatggaatgttacggttaaataagtacttgataatagctatttttacgcggcctacctcgtaaattcatgaggcaggccgcatgcgtaaacacccctattccagaacgccgaaacaaacaatcacctttaacgaggagacacctcgcctcattgaagggaacttgcccttattaccgtccgaacaagaaagtacgctatgccgcgggattcgtaagcctattggagagcttgccacacaaacagatgctctccgttatcccgggactcatgaggcacttcagccggcgcacttactaccgtgtccgcaagggagaaaggccgctctcaccctccgagcaacaggtcgtattgaatgcgcttaaacgctgtggggtgaaggaaccaaaagacttcgacgcttatttcgaggagtacgactggtaaaccaaggaagagaggcttgtgccactacccatgttacggatgtgccatcgcagtggcacaactgtgccaatagcatggcacatcattggcaccacaaagtactattaataaagcaattagaatgatatcacggagtcacctcccagcatttccatcctttgttggcacagatatatacaatgtaggaacggacatgatagtgtgggaacttctccttggtatccttggcgtaagcgagtacttgcgccacgtcctcgggacggggatcgctgagcgccagcatgcgctccgcttctttcgctttgaaatacttgaattccgccaaccggtcgtccttgtaatagtccgtgccggggataccggtcatctcgaaatcggaacgtcccgccgaattgttctgctcgatggcgaacgtatagcagctgctcaggtaacgggaacaaagctcgaagaaggagcaacggatgaaattctcgttgatcttgtcgaacacctgcgcagggaactgaccgaggtattgctcgaagtagttttgcaccagcggctcaaaacgacgctcctcggtgaaacgctcgtaagtggggacatagcgttgggcatttccctcgatatgattcatctcgttgtaatagtccatgtagatgctgcgcatcgtgaggttgggcagcaccatgcggtaattactccgcagcgtggtcatgcccagataaaagaggctgaccggatagatgctcttgtcgaagaatttcctcttgttgaacttgctggacaggtcggaaacgttataggacaactcatcatcgatcaccaaggcgtcctgcatctccttggcgttctcaagggaaagagtcagacgacggatccaaccgatatccgtacgcaggttctcatccaccagctcactagggattccacctttacgaacggcgaatttcttgaagaaataggtcaggatcgtggaattgaacaagggttcggcctccggcaagaagcgataaccatcgtaattattcacgatcaattgccaaacatcatcgaaccgatcctgcccctccgtataggtatccagcacgtaacgcaagtagacctccgcttccttatacgtgaagcccagcatactcaggaattccggttccaaggtcaggatctccgctatattatatccgcttgtcaagtcatccatcgtaacgggaagaacccccgtgcagaaacaggtacggatactcccctcgccaatacccgccttgatcaccttgaagaaggtgcgcaggaaactgtccttcgtggttacctgctcatagagcggatccttgtaggccgtcaatagctgattggtgaaattatcgtactcatcgatcagcacatacacttttggcaatccatgctcgcgggcgtaccccaaagcttcctcaagcatcttggaagcatcaccacggctagagaaccggaagtccttaaaacaagtcccggttatgcgtcaccatgatctccaccgcagaacaattcaggtcattgaaattccgttccaacccctccatgtcatcagccatcaccatcttggagaaatcatagcgcacgaccatataccgattatgttcctccgtcgggtgctcaccgatccaagtcctgccgaacagctcctcgaaccgatcggccttggtgcggtcatagtaacacgccaaggtagagataagcaaactcttgccgaaacgccggggacggaggaaaacaggagcgttataatcttccaagctcgggatgaaatcggtcttatccacataataataaccacgttcccgtaaatctacgaaatccgctaccgcataaggaatcgttatccgtgccataagctttcttttttcagattagtcgcacaaagataaaaataaaaagtgagataaagttatatccttcacgaggcaggttaggcgaaactataattctgaatattcacttctagttgaatctaggacctaaaatattctatttttttcttgcacgcttaattttttttgataacttgcgcacatactagaacgtagataacgtttatcattctgcttacaggtcgcttttcgtatagctatattgcaatatagcaaacgaaaatgaaaaaaaccggtataatcacttatccggtccctctcaattaattcatcagttacatgactatccaataaatttgtttaacttaaaattcaactatatgcaaaaactaaaaacaaaaataacaggacttgcatttttcttagtcatagtatgtataagctgtgataaagatgataggctggtcggctttgtaagcatgattgcgctcgaaaataataatatctgtcttgtagcaattcatgaaggtccgaagcttggtgtaaccggcttgaatttctcgaatgccatacaactgtatatccccgataatcgtacagttaagcttgcctatacaataaaattcaattgtagagcttatgatccagccatagatggtgtgatattggatgcttttaccatacctcacccttcggaatcttatgacccacgggacccaaactctgaatatctttcgaacaaagtccctatgtatattgctgaaaatgttgaaataattaaatacgaactggaatgaaaacaaataatttgatatatcttttagtgattgtgcttttgtcttcaatacattgcgatgttaatgcgcaatattattggtcacaaaataggaaaatcgctttaaccccagactcatcacaccttgtgttgaatatagaagccgatttaatccgaactccaatgctaagttcggattataagggatttaatgaaatatcgccgaacatcattgtaaaagaaaataaatccaatatcttttctgaaaatgattttaaagcatacgagtcggatcctttagtgaaaagagcttctcctgcttatttagtaaatggaacagatacattatatgtaactaatcatatactgcttaagcctaaaaatggcgtaagtattgattctatattagcaggtatgaatgagatagtagaagttgttgatcaaactaaatatggggtttacacattatccgtgaattaagggtttgatgttttaacttatgccaatataatatatgagaatggtttggtcgatttttgtcatcctgactttataatgagaataactcaatttctgaatgaccctctttatagcgaacaatattatttaaataatacgggacaattaggtgggacgtggaatatcgatattaatgctcctgaagcctggagtatgacaaaaggtagttcttcgataaaagtggctgttatcgatcaaggtgtggcagggcatgaggatctgggtgatagacttttgccgggttttacgccgggtttagccaatgggaatggagcaccagtctcaaataatccacatggagaatgctgcgctggtattattggagcttctcataacaatttaggtatagcagggattgcccctctagtgaaaatagtccctgttaatatattttatagtcaatctagttctaatattgcagctgcgataaattatgcgtgggatgatgctgaagcagatgttattagtaactcttggggtggttctgtagctgatgcaattacctcagccataaataatgctagaacgaatggacgcggtggactgggatgtgtagttgtttttgcagcaggaaattctggttcctctgtttcgtttcccgcaactgttaatggggttatcgcagttggcgcagttgataaaaatggtgctttgtgttcttatagtgcaagaggttcagaaattaatctggttgcaccttctggtgccttggattatacaggggatattcgcacattggatttaatggggagtgccgggctttaccccggaaattatctctctacttttggaggaacctcagcgagttgccctcaagtttcaggcgttgcagcactcctactatctattaatccaaaattgacagaagctgaagttcgaaatatacttggacactctgccagaaaaattggatcttattcttactcaacagtttcaggacatccatttggaacttggaatgccaatatgggatatggtttgcttgatgcagaggcggctgtccgagaagtatatccccaaatatccggcgataatttagtgccatgtaccggaaataaaacctacacgttaaatcgtaattataaggggaattggacattaggaaccagtggcctacaaattgtaagtggaggacagaatagtaattcaatcacggttcgggctatctctaatccgggaggaacaataagtggtacgatttatgcgaatgtggtacttcctaatggctcttcagtttctgtagcgaaaactgtttctatcggtgccccatccataacttccgtgtccggtccggatcaagtaggggctggtggtagtgcatcttttacggctagccctatatttatggaagacgaagggaattatcaatggatggtcagtccaaacacggctagcatgtctgcctatcggtattcaaacagtgttaccttctccgcaccaggaacttatattgtgggctgtcgttcaaccagcacttgtggaacacccgggtcttatgtgataaaaacagtatctgttacgggatattattattctgtttcaacttcctcatccactcatatggttaatatttcaaaagaaactcaaatccaagatcaattcagtgttatgttagagactaggccaacctatactctatataaccaatcaaccggagcattagtaagggaggggacattcttgagagaaggagatctcttagattttaatacattaccttcgggcatctatgtattaagactccaaataggcaatgatacttatgaaacacataagattgtttttaaataatggatgtgttaagctggatttagaggctgttaaacacagacaatactatttcagcatagattttcgcatttaagctttgttctttcagacataatccatacctttgccgaaattttgaagagagagcagatgacaaacaagacacataaggataatccgaagttctattccggttatatgtcggaggttgaggctcttttctctattttacgggattataatttggttatataagatgcgttggttacttttactaacgcattttttttgtgtccagcggtccggtgatataatataaaggtataatattctaaaatcattataataaacaaaacaacccaaattactatgtcgaaaagtgatatcaaaaaggtgattgttctgggctcgggtgccctgaagatcggacaggccggggagtttgactactctggctcgcaagcgttaaaggctctgaaagaagaagggatcagtaccgtattgctaaatccgaatatcgcgactatccaaacatccgagggagtagccgataaggtatatttcttgcctatcactccttacttcgttgaggaagttatcaaaaaagaacaaccggacggaatcctattggcgtttggcggccagaccgctttgaactgcggtactcaactttacaccagcggcacgttggctaaatatggcgtgaaagtattgggtacatccgttgaggctatcatgtacaccgaggaccgtgacctatttgttaagaaactgaacgagatagaagtgaaaaccccgatcagccaagccgtagaaagcatggacgacgccgtggctgccgcttacaagatcggtttccccgtaatgatccgttccgcttacgcattaggtggtatgggcagtggtatctgcaaggacgaggccgagcttcgcaccttggcggaaagcgctttcgcttactcatcccagatcttggtcgaggaatctttgaagggttggaaagagatcgagttcgaggtgatccgcgacaagaacgaccattgcttcacggtagtgagcatggagaatgttgacccgctgggcgtacacacgggcgagagtatcgtagtggctccgacttgctccttgaccgagaaagaattagacctgttgaaggaactttccaccaagacgatccgccacttaggtatcgtgggtgaatgtaatatccaatacgctttcaactccgagacttgcgattaccgcgtgatcgaggtgaacgctcgcttgagccgttcttccgccttggcatccaaggccagcggttatccattggctttcgtcgccgctaagttggcgttgggctacggattggacgagatcggcgagataggtactccgaactccgcgtacaaagcgccggaggtagattatatgatcgtgaagatcccgcgttgggacttgacgaagttcgtgggtgtcagccgccagatcggttccagcatgaaatccgtcggcgagatcatgtcgatcggtaagagcttcgaggagatcatgcagaagggtcttcgtatgatcggacaaggaatgcatggtttcgtaggtaacaacgatatccacttcgataacttggacgaggagttggcgaaccctaccgacttgcgtatcttcgccgtggcgcaagccttggaacaaggatatagcgtagacaagatccatgagttgtcaaagatcacacgctggttcttggaaggcttgaagaatatcgtggattacgccaacgtattgaaaggctacaacaagatcgaggatcttccggaggatgtattgaaagaggctaaacgccttggtttctcggacttccagatcgctcgttacgtagagagcccggaaggcaatatggagaaagagaatatccgcgtacgcaacttgcgtaagaaaatgggcattctccctaccgtgaaacgtatcaacacgatcgcttccgaacatccggaattgaccaactatctatatatgacttacgacggtacgccgcacgacattacctactacccgaatgagaagagcgtgattatcttggggtccggagcttaccgtatcggctcgtccgttgagttcgactggtgttcggtgaatgccgcccagaccgctcgtaagctaggttataaatcgatcatgattaactataacccggagaccgtatctaccgactacgatatgtgcgaccgtctttacttcgacgagctttcattcgagcgcgtgctagacgtgatcgatctggaattgccgaagggcgtgatcgtctccgtaggtggacagatcccgaacaacttggcgatgaaactgtaccgccagaatgttccggtattaggtacttccccgctatcaatcgaccgtgctgagaaccgtcataaattctccgcgatgttggattcgctaggtatcgaccaacctcgttgggcagagcttaccagcatggaagagatcgatgcgtttatcgagaaagtaggtttcccgatcttgatccgtccgtcttacgtattgtccggtgcggcgatgaacgtttgccatacgaaagagcagatgatcgagttcttggatttggccgctaaggtttccaaggaatatccggtggtcgtatccgagtttatgcaaggaacgaaagagatcgagttcgacgctgtcgctatgaatggcgaggtggttgagtacgcgatctccgagcatatcgagttcgccggtgttcactccggtgacgctaccttggtgttcccggctcagaagatttacttcgagacagcccgtcgtatcaagaaagtaagcaagatgatcgcgaaggagttaaacatcagcggtccgttcaatatccagttcttggcgaagaataacttcgtgaaagtaatcgaatgtaacttacgtgcctcacgtagtttcccgtttgtatctaaagtattgaaacgcaactttatcgagacggctacccgcatcatgctggacgctccgtatacgaaaccggataagagcgcattcgatatcgactggatcggtatcaaggcttcccagttctcattcgcccgtttgcacaaggcagaccccgtattaggtgtggacatgagctccaccggcgaggtaggttgtatcggcgacgatttcaacgaggctttgctttccgccatgatcgccgtaggcaacagtattcctaagaagaacattttagtttcttccggcgcagctaagagcaaggtcgatttattggagccttgccggatgctggatgccaagggttacacgatctatggtacgcacggaaccgccaagttcctgaacgataacggaatcaaggcaaccgccgtttgctggccggatgaggaaggtgatttgaacatcatggatatgttcagcaatcacgctttcgaattggtagtaaatatcccgaaagatcatagcaaacgtgagttgaccaatggctataagatccgccgtgcggcgatcgatcataacattccattgatcacgaacgcccgtctggccagcgcctttatcgacgctttctgcaatatgaacgtagaagatattcagattaagagctggcaggagtacaaataatcaaaatttgattatatttgcatgcgtgtaatagaaagagacaaggctttatgccttgtctctatagtttaaagaccatgtacagacggctaccttttatcatattattatctatactggcggttttcgccttgcgtgcgtctgtggtcgctccctctatcctcgtacaaaattattccgtagacgattacaaggctagttgccaaaattgggatttagcggtttcctatcatggcatcttatatgtagctaataattccggtctggttacttttgacgggaatacatggaacacatatccattaccggataaaacccctatttataaagtatctttccagaacgattctatctatacccaaggcaaatcatcgttaggctattggctatacgacaaactcgggaatctggaataccatccgatcgatacgctcccgtcatatataaatttcgatgatcccgagacgaattacacgatcccgaaagaaatcgaggagaagcacccaacttccttcgctagcgccggaggtctcaatttcacgggaacatctacgtccggtatttatatcaccaacgacgaaggggagatctttcaacatctcaacatcaataatcagttacaagataatatcgtacgctccatctgcgtacaggataataatttaatctgggtcgccttggataatggtatctcccaaatagatatcaatcctcccatcgccatgttaggtaaaagaagccagatcggaaagttggaagacgctgtaaaagaggataaccgcctctatatccggaccaatgtcggctacttcagccggagcctgatgtttggtgataagtttaccccgatatccgatgagatcggacgttcatatatccatccggatacgaccgataatcatttatcggtaagctctttatttaagaataaagacgtattgagcgtattcgccaacgcagaaagtatttacccggttccagacaatttgtattggctcacgatccagaatgaggccggactcttccatcgggaaaacggtacaggaactttaaaatgccggatcctattcgataattacgatctgaatctggtaaccaatggcaaacggatcatccccttgaatgattctcttgatttggtatctgccatgcaaggaaccctattaatcaacactcgtcaattaatagagggaagcctaggaggattgacgatgccacggtttatgcgcatcgagtatcaagatcaagaaggtacacattatttatatccggacacgcaaagaatcgacctgccccataacttccaagaactctcgctatacatcggaacaacggtattcacccctaatcaccaaatcagttataagctggaaggggtatccgccgattggtcttcttggcagaaagacggcaaaattaccttcttacaacttccggaaggaacttatgagctaagggtacgtaaatatgtaacccgtgggccgtttcccgagatcacgatgcaaatcacggtgcgccctccttggtataataccgtatgggcctatttgatctacgtcgctttgatatggttcgccattcaagaaggacttcggtaccatttaaggaatttgcggaaaaaagaacaagaaaagctggaggcagagcgacaagccgaactgcaaaggcttcaacaaatgaaaagcgagatgctggaaacggagttgcaaaacaaaaacaatgagcttactctccagacaacagctttggtaaaaagaaacgaggcaatccaagctttgttggaagaactggataagcagaaagagacattgggtgaccgataccccaataagttatatacccgtttacgttccttgatcgaatctaccttgaacgatcaagcggattgggtgcagttcgagacctatttcaatagcgcccaccagaatttcatggatcgtttacgccagcaatacgcagatataacggcaggcgatttgcgtatttgttgcttactccgcatgaacctttccacgaaggagatcgcatcgttaatgaatgtatccgtacgggctatcgagctaagaagataccgcttaagaaagcgattagcccttgatggggatacgaatcttgtcgatttcctgatgaactactaaaaatattttccgagaatctcaccagaacgcccgacgggttggttatacgtcctccaattgcacatggctaccggaggggaagaaagctacaagatcgtattgaagtaaaaaattcttcccgaaaatgatctctcgacaaactcaacatctaacatgaataatttattccgggaaattttcacatggaaatcattacactatcaatatatatatatttgtattcaaacttttgtttcacttaaatttaatgatgtatgggaaagagattttttaaattcacggcgttaatcagtttgatctttttcgctataaacgtagatgttttagcagaaggtgacagtgatgatcatgcttgcccggatggcgaccaaggcccagtcataagctgcggcagatatgaggggacttgctggaatgtagattggataagtggtatttattatgtgcattgttatttctcaggaatgcaagaacatcattgttatccagattaaaaagtatgaaaagtatcatctattatttttcgatgatatccatatttttctttctttcttgtacgggatggaaggataagaaaaacatggaatcagatatcatcaccgtgaatttggacgagcgagacgagatctccactaaagatctattttctgagatccaactcattccgttagagacaacgccagaatcgctgatccgtaatataacccaaatcaagttttttgaggatcgatattatattcacgattattcgagatcccaaatctttgttttcgatagggagggacatttccaattcgcacttaacgagaaaggaaacggcccgggtgagtatttaaacttaacagatttcgcgatcgatacgacccgcaggaaccttgtagtactttgcgccgtcagcaacgctctctttttctatgatctagggggcaagttcatcgagaaaaagaaacttcctgaaatagcgggggcctacaacagcctacagttccaaaacaaggatacgatagctttcttcacatacgattacgaccatcgcttgaagttttattccctatcaagaaacgagatactcgatgaatattttcctgaagacataaaagatgtattttgtaggggtgtatttccatttccacacgcttttcgaaggtctttgactaatacgatttattcactatcgggagcgacctttacagagctttatcgttgggattttggtgatttaaataatgacatcgaaaaattagaattccatcccaatatgagcaagcaagaaataattcaatacgcgaaggatgtctattcctctaagagcgtaaattatataatagactctcagggacaaaacagcagatatcgatacgccatggtagtccgccaaaacaagtacatccaactgttttataacaggaaaaaccatgacttgcttcaattcgagcgaaccaaggagggcttgcaactttacccgatctacttcggagaagacttcatcctctgtactccggaaggagggcttccattaaatgatctatttcccgagaagttaagaaatgaggatcagcaaagaattattcaatcacattcggaacaagagaatcctgtcttagtaaaatatattttcaaaaatgaaggttaacgagaatacaatttatattttccttttggggatactggcaggcataatttgtatgcaatgcgtgaatcattttagaaaatccccgaaggatgtgtatgttgacaattttgaatacgagaaagaaagtctgggtatccttaaaagagaagaactaaaaaatgaacactatgaatgccttgatcaaatagcctattggggaacagactctctagattctttctccttaagtaatttatgtaatgataaaaaattattcttttgtttttcagagaaaacatgtcctccttgtatcgatgcagttgtcgatataatgaacgaggtttttacagacgaggaaataaaaacaaaaatagttttcgtatcgcctgattatcctgctcgattaagaaacgattgctatgggaaaaaactattgagcttacataataagaatttagggctacctatggaactagaagattctttcgctcctttcttattcattatggataaagatttatgtgttaaatatttacatattcacaataaaccactcccacgacttactttaatttatctggaagagataaaaaaatgtggtagatcttattgcggttgatcgtacgatattaagccgcaggctgttaacgaggatgggaaggaggatttgatcatcgtcggaagctttgaggaagcggaaggaatgatcgaagaaagaatcgtgttggaattggaggatgtgccagcgtatctctggcttccggatcgcatcactttagaatctcgcaaaaagtgagtcttatataattttaatctatttgacatataatatactatataacagcatagtatatatatacaaaaggagcttgagaaagtcttgtagtagtcttatccaataaaaaaatcatttgcgcaagtcgtgtagtagtcattttcatggctaccgtaatttattgtgtttcctttgccagcgaataaaatcttaaattctttcgacatgatgaaacacgaactggagaaacaattagatgcgctagaaaagaaaggtgtcgacagacggcatttctttaagttattagcggcgacaggactgatcgcgggagctaataccggaaaagcaaacgctttttcaagcagcgcaaaaggtaaaatcgttattatcggtggaggagccgctggtatcagtatggctgcccgattaaaacattggcttgatgaaccggatatcaccctgattgaccccagcgatcgtcagttttatcaaccgggattcactctgatcgcctcaggtgtataccaaccggaagatgtttggaagaagcaagaggattgtatgcctagcggtataaaatggataaaggactcggtcgccgcggttgatcccgtatggaatcaagtaacgaccaaaagtaacggaaagattccgtacgactttttagtactgaccccgggattacaatgtaactgggaaaaagtagagggcattacccacgacaccttgggacaaggaaacgcaaactctatttacgatttcgaaggagcccaaaagacatggaaagctcttcaagaattcgctaaaaaaggaggcaaaggtatttataccgatacctatacaaaacataaatgtggtggcgctcccaaaaagatctgtttattatccgagcattacgcaaggaaacaagggactcgcgacaaactgcaattgaattattttaccgcatcgaaggagctatacgatattccgtatttcacgcctcgcttgctggaaatatataatgaacgtaatatacctattaacttgaatgtacgtgtaaaaggtgtagacacatccgcaaaacaagtgcattttgagaaaatagagacaaaaggcgaagaaaagatcgtaacgccgttcgtagaggattacgatttcttacacttcaccccgcctatgtccgctcccgatttcgttcgtgatgccggattaggttggacagaaggtaaattggccgcggacgcatgggtaatggtcgataaagagaccttggtacataagaaataccagaacatcgtttctctgggtgatgtagctggtatcccgaccagtaaaacatctgccgctatccgtaagcaagtacctatcgccgccaagaacctgatcgcgctcatggaaggtaaagagccgaccgagaaatacaacggttatgccgcttgcccgatcgttacggattatggacacgtgttgctttgtgagtttgactacgaaaagaaacccgacgtttcattcccattctcgatgatcgatacatcaaaagagcaatggcttgcttggatcttaaaggtatatattttaaaaccgatgtatttcaacggaatgcttaacggttacgcataatatgaataaagaatctatgaaataaaactccctataatttcgaatgccaaactacaaagccccgggtttcagttgtacgaaaccggggtttttgatttttaacgggtagccttttccactaaatatacgatcgacttataggatatcccactattcatcgtcaaaccaatctcgcacgtacggctattgctatatccttccgtcgccccatgcaagttcggtttcaagtaatgaagaccggaagcgtttagttccggatagaagaaaccacgatcgcccgcccaaccgcaacaagtaacttgagcgggagagaccacccggttcgcgcataagcctgccagttccaccagcttgtcttgtactcccatcttcgttgtactacaagtagagtgtaccgctaccgtaaccggcaacttagtaaagttcagacgatcacgcataaagtcatagataaactccactggttcatataatcgtaaacgtttatccaaggtttccctcatatgcagcaagcaagggctcatgtcgcacaaaataggcaatcggccgttatcgctcgcccgcaaaagagcctcattcaattcctccgccttctgcgccgcttgcttccggaaccccttactgctaaaagccataccgcaacaaagcttgcttagattctccggataacgaatcgtaaagccggctcttgtcaacaaaacgattgtttgttccgttacactcacgaaatccacatcttcataatcagccgaagtccccatcgtacgggtaatacaagaggggaaatagaccatttccatcccattctctacacccgtcagttccttgaactttgacgcgccagaaggtgtatgccgagtccaaagcgggaatttacgagcggaagccttaaacaagaaagaggcaaatctctcgaatgcattataccccaccagctttgaaagcacatggggcaacttaagcaaaggacgaagcatacccgttacgactcccatattcccggcgatgcccgaagcgatagcattcgccaaggtatcattctcttcccaccgtaactctttgatcaataaaccggtattaatgccaaccggacatgccgtagcacataggccatcggtagcgcaggtagcgttacctttatagttaaaggcattcttgagttctttatatcgcttagagtttgtttccccctgttccgccaaagccgataattccctatagatcacgatacgttgccggggtgtcaatgtcacatgccttgacggacattgtatctcacaaaaaccacactcgatgcatttatcgatcagctcattcgccaacggtatttgctttaagttctttataaacacatccgggtcccgatttaaaaggacacccggatttaatatattttccgggtcaaagagccttttgatcttccacatcaactcataaatctcctcaccccattcatctttaacaaatggagccatatttcgtcccgtgccatgctccgctttcaagctaccgtcgtagtaaagtaccacatctacaaggctacgcataaaagaagcgtaatgatcaataccttcctgtgcgtttatatccggaaaaatcgtgaaatgaacgtttccatccaataaatgtccccacatcaccgcatttccgtatccataatccgacaagaccccacgcacttgttccaaagcctctcctaaaacctcttcccggaaagcaatatcttcaataatagataccgtcccccgtggccgtcttcccgcagcggaagtaaataaaccgtttcgtacccgccaataagtagcgtaaagcttcggatcggtcgtaaatgataccggatataaggtctgtatatctgctagccgctcctctatatctcggaattggatttgaagttcttcttccgaattagaagacgtgtcgatcagcaacgctaccgcatcctcgggtaaagaatgtaatatctccggcatccccggttcatcctctaccgcatgtaaggcgtttctatccatcaactcggcggcggacactttgcattggcgtaacggggctatggctctgcacgcctccatcaaagagggaaaataaatcaaggcggaagcttttaaagcctcatcggggactgtctcgaaagtaacagaagaaataaaccctaaggttccttccgagccaaccattaaatgcatgagtatatcgtatggatcggtataatccaagaaagagttcattccataaccgcaggtattcttcaactcatatttagatagaatccggtcttccatgtctggattcaacaaaatctccaaacggaaattcatcaacttctccaataagcctatatgcgtttgcatgaaatccctgcgactcgctaacgaagaggtatccaaaaaggctccatccgcaaagataatctccatatcccggaccgtattataggagttatggataataccatagctagaaccacttgagttattcgctacgatcccgccgatacgtgcggatttgatggaggcagggctaggccctagcttacggccataaggtttcaaccagcggttcgcctcttctccagttataccacaagggaatttagccaaactcccatctcctgaaatcttaacctttccatagtcaggactgatttccatcaatacagaatctgtaatagtctggccggataaagaggtccccccagctttaaaggttacagatttaccagtcttctcacattcagcaagaacacgttttacatcctgctcacaactcacgatttcaactcgtttgggattcaacctgtaaatcccggcatctgttcccttcgctaatgcagttaaaacatcaacatataccttttttatcttcatagtctaatacctttatttgtctagtaacgacatttcaacaaagatatgaaacctttaagacaatcagggcattttactaaaataacggggagaatatccgggtactagctccggatggaaaatccagattaaatctttcaatagatattccggatgtaatgggaattcctcgtaataaggaactatccctgtattacaggtataaatccgttgttttttaaaagcgtcgaaattctcgtagggagtatattcggagcgtaaatcgttataggtcatctcggaagactgattatatttaacaagccaaatatccgcatggatcgctttatcaaacacggtctcaaacgctaagggggtacttccggcacccggtaaatccttaaacatataatcggctcctgcatcctcgaaaagatgggccatataactatctccagccggtatataccatgaggaaccgaactttttctccgacaaaacagtaggacgcttatctatattcacggttaagttctttagggacagataggcttgctctgtttctttaaatatagaatcggccatctcttcctttccgaatagcaaaccataaaagcgaatccactccgtgcgccccaaaggaaatgcctccatatagtcggctccttcgataatgggtatccctatcttctcgacaggcccataactactgttctgaaacggggaagctatcacgagttccgcaccgatctctatcattttctctatattcggagaggtagcctcacctaaatcagcgattcttccggcctgtataccctcttgtatggcaggagtatccatataacgaggctcacaaacacctataaccttattgatttcgtgcaattgatcaataatagccgcatgaacagaagtataaaccacaatatcttttaccgggaccttcacgatcgtccctttgggtaatccgccaggaaccgactttgtccggtctaccaataaatagcgttgaagcagacgagtactatcccacggatcacgaacttccaccattgtataggtatcaaagcgctgaaccgtgaaaccttgggcatattgaattctatcagaggaaagagcttccttggaagaagtttgctttccggatggcgtacatgccaccatccagaaagcgaaccctaagagaatcagtaatcgcattagatattatctttttgagcgaggactactttcatgggatttaaaccggcctcaaacttcttgaacaatttaccgtcacctccgaaacaataaatatcgccattattcttataatcagactctgcgacatagacatttccacccacagcactgattgaataaggggactgtattgaggttccatctgtaataaagctcgttcccgcagattgactctttgtatcaaatgttaaaaatgcagggctagacattccccattgcgcatagaacagaaatagcttgccatcctcataggccatctccgttgcgtttggacaattcgtaagggaagtaacctcataagtctccgtatttatcttttgtaccgtattgggtatatccgcatagttacccatagaaaccacatatacatttccttgctcatccgcctgtatccgtgtgggattcaatactacatccaacttctttatctctgtaaaagtagacagatcaaccactgataccgttttatcatacccaacctcggtactgtaatccatacctccggagtttgagacaaacaatttattagaagataccgccaattgttccggattccgtccgacctttaccttcgcctcaacctccaaggatgcggtatccaaacgagcgacatatccattataatagctaatatagacttttccaccctctgataccatataacggggctgcccctctgtcttgacttgcttaatggattttgccttcagatccgtcacttctatcgtagactctccatataccgcaatatacatcttatcgccatacacgatcatatcctgtgccgtatctcccagccccctgccattttgagccaagaaataatcgggaacaacctcatccttttctatgtcgtacatatataaagaagagttgttatttcccatattgcccgaattcaagaaatataaagccatgaaagaactatccttcacaaaatcaataactcttacggaagcataaacagaagactcaccttccgcattcgcggctataactaataaataacctatatttacgacatccgtaatagcatatgaatgtgttccaacttctacctccgcaattttcatatctttaacggttccatcagaggaaccataaatcacgtactttgttacattgtcaacagaagacggagctgtccaatttaaggttccactaacttttaaagcttccggattctcatccgtaaaactgacattagttacagatacatttggtatattcagtgaaggctcattgtcatcatcacagctgacaaacgagaaagacatcaatgcacacaaggcagagacacaaaataaattcctctttttcattactttacttttatagtttactaataggataaacaaacacttaaacgccaagaacggcccggcatgggataatactgaataacatcataattcacgttcgtaagatttaacaattcaccttgcaaatgcaaaccgaaatatcgaaaacgaaaatctcgatttatagaaatactctgttctatataagaatcaatcctgttccgatctatattttgcggcaatgcataacgatcaccaaccgcagtcagtatataagagacatttacccatggattttccaaggttacggaaaccgtgcctgaatgacgaggtgtataaggaatctgatccttataattcttagcttccggatctgtcacatcaaccgcatattgaaaagaataagtggaagccaaaaacaagctcattcgtaagggcaatcggaattgtgtagataaatttacatctacccctttaatatccacttcgcccatattcatcatcttccaaacatacatggtaggtaaagccacgatcttatctttcaccgtattataatatccatccgccgaaatactgaaatgccgcagccaatccccacaggaagaactccatgttacccctacattatattgggaagtttcttccggtttcaaatttgtatttcccatacggaggtaatacaagtccgtaaatgtaggaacccggaatatatctttgtaagaggcacgtatccgcaatgtactttccgagaatggccgccaagacaaacttacagccggggataaacgccttttatcatccggtttttccccttgctccactttatcagtgatatatgttcccaataaactaccggtagccgtgaatcggctgttcttatattgcaccgctagtaccgattgagaggccattcgctttggattaggtccgtttacaaaattattgtccagcatagagcgagttaaatccgttgttaacgtcgccgatacatactttataggagtatacagcaaacctacagagccataatactcattctgtgtattcaagtcgacttgttcgcctgcggcatatttatcatttacatctaaataacgagtaaaagcataattatacttagccatggcccgtagcgtaaatttctcattaagaacattcttataccccgattgcacgaaaaagttattatcccataatcgttcagaagtgttcttgttatataaattaacagaaccgggaagtccccgctccgaatcaaaatagtacgccttaaaggaaagttcgcctccccttccaaaatcgccgaatagattaccttccaaatggtaagcatggatatcgctatttctacgcttctctttcgtctccaattccccattaatcaatgtatagggatattgcccatccgcacgcacgaaatcaccatgtaaggatgcgctccaacgctttcctaatttttgatcataatgcagcacgggattaaaaagtccgaaggaacctcccttaaccttaagataagtatgaaacgatttgtctttaaacgtgggctttccggtttgtatattcaaggctcctgccgaggcatacacccttgccgtttggaagatgtcatccgattgtccgatcgataaggaaaccatctccacgttatccaacgagaaacggctgatatcgacttgcccgctttgcgcatccgtaatcgtcaccccatcgtaactgacggcggtatgcttcgctcccaagctacgtaccgagaccgttttcaatcctccgatccccccataatcctgtactgtaactcccgagaagcgtttcacggcctcggataggtcttgtactcccaagcgatcgattcccgcccggtccataatttgcaaaggcgtaccttcacgggtaaccgacggacgtaccttctccactacttccaccccggaaagctcgtgataggccgtcgtatcgatctgttgaccgaaagcgacacccaaagaaaataaccatacgctaaaaacgcacagacatcttataagatataaatctcgcataataattcttaggtttaccaacgtcttcacccgaaacgtcgcataacaagatcatggcaggttttctggctcgtccaccctctgtcggctaccttcccacctatccgataggcagtggcaacaagatttgccggggctacaaggacttacagctacgggtacagctccggattcacaccggattcccttttactagccactaccggaacggatagcggttacaccttgatcggtggcaaagataggaaatgttttctgtattcttgtggcgttacctctttcaacttttaaaaaatccgattaaaatgtggaatatcattgtccctttcttatttccacttgaaacaatgtatatccgttaagttgattctcatgatatactcatcctcgccaatatagtcatccagcaatctttgcgagaagccgcatccaccgcaagactccgctttcttcaaaacttctacaagcggatagaacgtatgctcgtactcccccggccgataaacctcctcctcacacataagcgtttcttttgtatcacatataattaggaattcactattatctttggcgaatcttcttgcgcattccaatcgtgcggtaaaacttactattttgccgtccttaccgatttctgcgcacgtgcggaatagaacaggtctggttgccggcagatagtttctcaagacgatgtcccacacatcgaaaaaggcttttcccttttcggcgggaccggtacgaatccagttatcaataaacgtaatggtccgctcggttatccccgagcctttttccatgatatcaatcaggttttgagctatctcaatcttctgattcccggatagcctgtatcggaacttgtcgtccatcaagtccaaggaataaccgtacaaggcttacctgtcgaagggtaggccaagtcaaaattaacacgtatcgtttgtatctcatcgatttctccgggagcgatgcggatgttctctatcacataactgccggcggcctcacacatcttatcccgctcaatgtgatgctgcccgtgagtgccgaaatgtcctttcgcaccgatcttgtcggtctgcctttcaagccattcgtatgtcggatggctcgtatctaattcaatatgtagattcatctttttccgcattcagaagtctatccggaacaaagttaatataaaaagtgagattgagaaaaacagatctccatccgttcgtcttcttctcgatttttaataactttgtaccttcaagctgtaaaaattggctcaaacaagaatatggctctgcaatgacatgaattgaaagcatgaaaactgaatatcaaaaatgtatggatgaggagcctttcgacggctcatcgcccgaaataacggaaatgactgtccgtaacaaaaggctactacaccaactcagagaaacggattatgccgacaatgaggcaaagcagcgcatctatcggcagatgttcggaagtatcggcaaggatgtttacatcgacatagacttccgatgcgagtatgggaaaaacatctatttcgggaacaaggtgatcgtgaacatgaactgcacgttcctcgataataacaatatcattatcggtaacaacgtgatgatagcccccgatgtaaaaatatataccgctactcattccgttcaccttgcggaaaggatgccggaaaggacatgtcccggagcgtccatctgcgacacaattgcccgccccgtccttatagaagatggtgtatggataggaggcggctctacaatccttccgggtgtgaccatcggtaaaaactctgtcatcggagcaggcagtgttgtcgtgaaacatattcctgccaattccatagctgtcggcaatccttgccgtgtaattaaaaatatcgaagataatgattaaaaacctcatttttgattttggcaaggtccttgtaaatcacgatttgcaacccttgcttgaacgacatttcggggatgatgaagtgtcgctaatcggttttcacaagattctatcagatccggaatttataaacatgtgcgaccgtggaataatcccgtttgagaaaatgattgacggagcgataaaaaggtatcctgaatatagcgatgccttcatgtttttcaaggataattatcttgaagagataacaggagagattgaaggtatgcgtgtacttctaaaaaagttaaagcaatctggattcaaactatatgggttgacgaactggagcgacacaatctaccgggtcatggagaaattcgacatattccagttgcttgacggtgtggtaatatcgtgtgaggaacacttcatcaagcctgaaaaggaaatttatcttcgcctttgtgacaaatatggccttaaaccgtcggaatgtttgtttacggatgacagaatggtgaatgtattgggtgcaaaggcgattggaatggaagccgtattgttcacaacacccaaagaatatatttttgaaatagagcgaattttcgggatcaaaattgaacaataatagctacagccagtgatggtgatcgcactcaatggaaagattgtacgctaccaaaagcaaataggcttacagggctacaagggattacccttcggtacgtatgtcatccagataaatgagaaaacattcaagatccaactctccaaataaccgcaaggcgggtatgcttcacgcacccgcctttcacatttgcatatctcccgtttttttacgaatattgcatatcggtaatcaacaaataagataaacaggaatatgggtatcgggaaatggataggtggcgtcttgggatttatggcgttcggaccgctaggcgctctagccggcattatattaggctctttcttcgaggaaggggcaaatatgacggggcagtctttcggtggcggcaccaattacgatgatgaatatacacgaagagacccatacgccggggaacgtaacagtttccttttttccatgttggttatggcatcctatatcatccgtgccgacgggaagatcatgcatagcgagatggaatacgtccgtcaattccttcggagaaacttcggcgagattgccgtaagccaaggtgaggagatattgctaaagcttttcgaccaagccaaacgcatggatcaagagaacaacatgggattcaagaataccatccgggaatgcggaacccagatcgcatacaacctaagttatgaggagcggctgcaattgctcgcgttcctcgccgagatcgctaagagtgacgggaatgtgtgcgcggccgagatcaatgccttgaaagaggtagcgatggcgatgggaatgtctgatagagaagtcgaatccatgttgaacctaaaaggaagttccttggacgatgcctacaaggtgctagagatagaaccgaccgccacggacgaggaagtccgtgccgcctatcgccggatggccgtcaagcatcatccggacaaagtagccagtttgggagaagacatccgcaaggccgccaacgagaagttccagaaaataaatgaggccaaggaaagaatctatcaatcgagaggcttgaagtaagattcgacaaacagtattacttacgaattgtcagccaattacatttaccaatatcttctttatgatgtaaatattctttctcctaaatagaagtggacagacatatcataccttacaaaaacgcaattggctgtttatagaaaaactttttcatatatattttctaaatattagaaaacattcatatctttgcctccgattttagtaatcaagctatcacatagtttggtgagagggaatccggtgtgaatccggagctgttcctgcagctgtaatcctcattaagttggttagaagttcaaaagccactgttccagaattggaatgggaaggtttctaaccagaggagagccagaatacctgctaaagtcttacaataacatcaagcttccaggatagaagtatgtgtcatacaaaaaacgattcaatttattttttgagacataaccagatagaggcttgttgttttatttcgtgtataaataaaacactatatgaggcttttagcattcgctattctggtggcatgcgtacaatccgtatgcgcccaaagcatattgaaagatccgaaggaactttccgtgctattgaacgaggtcgtggtcaccggtacgggtaccgaacactatctgaaagacgcccctgtgcaaacagaggtaatcaccggcaaagcccttgacagttaccaaggacgcagtatgcaagatattctggaagggctgaacgcttccatcacctttaatccgagcgacatgggtagtggcatccagatgaacggattaggcaacgattacatcttgatccttatcaatggcaaacggatcaacggagataccggcggacaaaacgacttgagtattatcaaccccgccaatatcgaacgtatcgagatcgtaaaaggtgccgcctcttccctgtatggctcagacgctatcgccggtgtcatcaatattatcacgaaaaagaaccgggataaagtgagcctatcgaatacgactcgtgtcggatcatatggagatatattggaaagcgtacaaatcggctttgggcataagagagtgaattccaccacctcacttagtacgacccatacggacggctggcgaaatacgacccaagaatgggaccatcacgaggtaatgaatggaaccgtgacacgaaccgtaaaccgatccacgaactttacgctaagggagaacttaacctacaaagtgaacgaccggctgagcctttcggccgatggctctttttaccagaagtggaattatcgtccgcacggcgcattcaagtattatacctatgatcaattctaccggaacttcgatgtggccggaggagctaaatacacattgggaggactgaattttctttcggtagacctaacttatggtaactatagttatttctataattaccatcataaagatgttacgaacttcttcgatccggagacggatttacgtatcactcgttatcccggagaacatattctggaaacctctcaacaacgtttcctaggacaagccaaaagcgtattccacctcggggaaaacaatatcttaagcgccggactcgaatatcaatacgatcatttgaaatctccccggcgtatcgagaacgggaaagcctccgtatttacggcttccgcttatgtacaagacgaatggaatccgacggatcggttgaatgtgacggtaggtgggcgcttcgtcgtgcaccaagagttcggggctacgtttacccctaaagtctccgccatgtacaaactaggcgacttcaatatccgagccacatactcaaatggatttaaggctcctaccttaaaggagttgcacgatgattatatcacgcagatcggcggcggcccgtggaaacattattatggtaataaggatttaaaaccgcaaaagtccaattattattcggcgagcgtagaatatcatgcgtcgaacctgcagatcacggtaacaggattctacaaccgtatcaagaacatgatcgccttgaccgagatcccgacaagcgccgaagacagattggatgagatcgaggccagcatgcaacacaagaacttatccaaagcccgctctttcgggggagatatatcgctcacctatcaaatcctatcttccttggctattggtggaggctatagctatacggatgccaaagcgcaatatacggatgatccggccgactcgaattatatgctctacaccccgatcaacggaacctcattccataatgccaattggaaactagcatggaaccatgcgtggaaaaagtataaattggatgtcaccttgttcggccgataccaatccacccgcttttatatcacggacggtgatggaaaaagttatcagctatggcgattgaatacccgtcataacgtattgaaaaagaaaaaatggaacctagatatcaatgtcggtatcgataatatcttcgattatgtggatcgtaccccgttcggacgccatcgtggaactacgtctcccggacggacttggtacgcctcctttatcgtgaaatttcagaataaacataaactataaacaatcttaaaagttaaatgcgatgaacaaatttaagtaccttttgcttgcggcgagtctatttgcctcaagcgcagtttttacctcctgtgatgatggagacgacgacaataccgcaaacccggcggaagaagtcgtaaagacaagtaagaaacatgacacggcgatcttgttgtgtacattcggtagcacattcaaagagtctatcaagacttacgacgcaacattggccgatttccagaacgcatttcccgatgcggacatctatttgtcatttacctcccgtacttgcgtgaatcgtgtagaggcagagaccggtatcgcacgttaccaaccggacctttggttacaagctctaggaaatgccggttacaagaaggtagcggtacagtccttacacatcatcccgggtgaggaatacctaagcttgatgaatacggacgtgaagaagaaattcatgatcgagtctttcccgagtgttcaagtcgtaaaaagcccttgtttggtatacgacgaggatgatgtggaagccgtagcgaaagtcctatacagccactacagtgataaattggctgataacaagaacatccttttattaatgggacatggtaacccggataaaaactataacgcaaatacgaaatacacggaaacagaagaggctatgcaagccttggccgctaacaagaatgtattcgtaggtaccgttgattacggagatatgttgttctggccggaagaaggcgaaccaaatgaggaatgtgtctactccaaacttaccaaatactgcgaggatcataacttaaaaccggaagagatcacgatctccttagctccgttcatgtctatcgccggagaccatgcgcataatgacctttggggtatcgaggagggtgatgatttcagcgctgccgctcctaacgccgacgcttgctggagactaaaacttttgaagatgggcttcaagatcgacacggaagaaagccataacggaagcttggagaattgtaagatcataggattaggcgattacgacgctattcgtcagatctgggtgaatcacctaaaagcattatataatgacgcggaagcttgggaaaccggagaagactaccagtaaataattgagaattgagaattgaaaattagggagtacttactgaaccaattttcaattctcaattttcaattgttcagtgtgtatataatttctttcgatcaaaaatcgtcgcccgtttatatttcatggcgaaacggatgtgatcgataaataaagaccggatcgccggattctcacctagaggttttaaataaatatccacatcgaaaccctgttgacgtagccctttctgccagaaatccgtaaccgtattttccgtacctcgaatcagtacgaacataaaaggaatcaactgcacacgcttatgaccggcttggcgcatttgctcacctacatcctcgatcgtagggaaaccctcacgggttccggtataataatctttcattcctttggtctggaacatataccccaatttcgcgtaagccgagttactggcatgataagttccgtgcgccaccaataacttagccccatttttagtcactccagaaggtgaggaaaccgctttcatcaccgcctcataatcggtatcatcatataacaagggattacctacacgcaaatccttaaacaaaccttttcgctgttccgcctctttgcggatcgcttccatctccacaccctctataatgatagtcggttggattatcacatgggtaaacccttgatcacgcaactctaccaaggcatccgccggcaactgaacccaaacaccttgcaccctcaaccgactcactacgctacgggcgctataagcctgccggacttccacgtctgggaaagcctccttgacacgcttgttcatcacatcgagtacttgggtacgagcttccgggtaagcactcccgaaatgtaccatcaagatcgctaacttatctcccttttccatgctctcccggatatcggaagcgtaaaactcccgcccgggtttcgcccataatgaacaggcgagcccgagcaggagtgaacaaacaaacatggatcgtaaaaatcccctatacattattatattagttaatagttgacatgtgacagtttactgcttgaaacggaccagaaggctgacgtaataggtacggcccggggtcaatgtagcgtaattgtaattaaagggacgatcatctacataatcaaaaaggttctcgatacctactcccggttccaacaagaaatcgccggctctaaacgtatggctcgtattgagattccacaaggaatatttcggtgcgtatccataagaagtagaataacgttccccttggatacgtccgttaaaattcacgttcagcttatacttattccaagtatgagaccacatagccgctaccgtaccactatgcttaacggtcttatccaaaggctcatcctcatatacgttttttccatccatgaaactatagccaccattcaaggtaaagcccgctcccagataactattgaaggccacgttaatacctttgatcttcgctttatcgatattcgcacgcatctgtatctcatcatagtacgtaccatgggcggtgttataagcatcccgttccgccgtatccaacatcttatagttaatcatgctacgtacgttattcataaaagcggacacggacaaagagaaataccgcatcgtatattctgcgctcaacgtaaaattgtcgctcttctccgggtccagatccggattaccgatcgtaaggcgagtcgctccggacgctttcttctccgattccgtatacaactctttcaattcaggtgtacggaaaccagccgcatacgatccgcggaaattaaaaccgcctaccttatacagcaaagccacgttaggagtcgcataactcttaaaattctcatggtaaatatagcgcaaacccgcgtacgcttggaaatgctcattgatattgatctcgtcttgagcataaagcgcagtcgtgtacatacttttacccgctatgttatccgtctcgctactcagtaactctttaatgaactccgcaccagccgaaagcttattatatttgcccaaacgaaagattcccttgacattcaagttatggtaatgaatccgtttcgtcatatcactctctccgcttttctttccatcaaagaaatccttatacgtactatgattgtccgacagataatcagcgttcaaataagagttcttattaatcatgtattgagcgcccgccccataagtgaacgtctcttttctcatatcatagttggtcgtattcactttatccattggcatcggacgatcgctggaacgtccgaagaaagtaccacgcacataaaaagacaaacgatccgtagcgtcgtacgtgaaacgttggttgatcacgttccggtgaaatccctcggaagcttgcttattggtaggaaccaactcgcctttactctccgtatagggatttaattgccaaccatcggcccgttgatattgataagaagtatatgaaccgaacttccctacattcacgtccgcattgaccgactgcaagaattggttcttgctaccataacggctattgctcgtcacgttcaccttattacgggaatcatccgtgatgatattgataacgccggcgatcgcatcgctaccatacaaagcggaagcggccccgttcaatatctctacccgctttacgttagacatatcgatacgggaataggtatcatcgccggccaaacgcttaccgttttccaagataaccacgtatttctctgtcaatccgttcatattcatcgtagccccctgtccgttttccataaatacgatactcggattcagcttggtcatcgcatcttggaaattggttacgctcgcctctttcaagtcttttcccgtaagcactttcacgggaataggagaattactcatgcggcgatgcgaaccggtaccggttaccaccacttgatcgatattcacatacttttctttcagcttaataacgacatctttttccgagtgatccgtttgatacacgccctgttcatagccaaggtaagtcacacgaatacgatgtctaccatcgggaaggttcagctcaaattttccgccggcatccgtggttgtaccattcaaggattccgacacgcggatattcgcgcccgggattggttcattactttcatccacgaccttaccctgtaaacgtacctgcgcaaatgatacgtttatcgcacaacttacagctaaagccgcgcacaaacactttcttttcataaacgatttgttattatgtatatttccgctttcctgaccccgagaaaaacagcaataaaaacgcttggcaggtttcctgacttacttcgtagagaacgaccttcccgtcttttacagacagtggtatgagaaatgttttctactttacaaaagcttacagtagcgggcactgctccggattcacaccggattccctctttatgacgaaaccggatggtttttacgtcatcaccaaaacgggggcaaaagtatgaattattttatataaacaaaaatatatcccggcttatgttctttaatagctttacaaagagaagcttataacacatcacatcgccaaaaaggaaaacaaaagcaatcatgcaagatacaaagttttccaaaactttttacaactcactgtaaattaatatattaacataatttaatcagcaaaaagttttccaaaaagaaaatcatatagagtaataagatacctttgcacgcataatcaatcacaaattaatcgacatcatgatacagacagttgttaaacgggacgggcgtatcgttggcttcaacgaggagaagatagtaaccgctatccgtaaagccatgttgcatacagacaagggagaagatatgcaactgattcgccaaatcacagaccatatctcattcaagggagaacctcaaatgaccgtagaggcgattcaagatgccgtggaactggaattgatggccagtagccggaaggacgtagcgcagaaatatatcgcttaccgaaatcagcgaagcgtagcccgcaaggcgaaaacacgggatatgttcttggagattatcaatatcaaatccaacgacatcacccgtgagaacgcgaatatgaacgccgatacacccgccggcatgatgatgaaattctccagcgagaccaccaagccgtttgtcgatgactatttattgagcgaagaggtcaaggaagccgtatctaacaactacctccatattcatgataaagattattatccgactaaaagcttgacctgcgtacaacacccgttggatcgcatcctgaaatacgggttctccgccggtcatggcgaatcacgtccggctaaacgaatcgaaaccgcaagcatccttggctgtatctctctagagaccgcccaaaacgagatgcatggcggacaggcgataccggcgttcgacttctacctagctccttacgtacgtaatagctttatcgaggaagtaaagaccttagaggatttatacggacaggatttctcccacttatataataagcctatcgacgattaccagacacagaccttggatggattaagcggtgatagacgcgtcatacaacatgccatcaaccgcacggtaagccgtgtacaccaatcgatggaggcttttatccataatatgaacacgatccattcccgtggaggcaaccaagtggtattcagctccatcaattatgggaccgacacctcggcggaaggtcgttgcatcatccgggagttattaaaaagtacttacagaggcgtaggtaacggcgagaccgctatcttcccgatccagatatggaaaaagaaacgaggcgtaagctatctgccggaagaccgcaactacgatctttaccaattggcctgcaaggtcaccgcccgtcgtttcttcccgaacttcttgaatctcgacgcgaccttcaaccaaagcgaggattggaaagcggacgatcctcagcgctatatccacgaggtagcgaccatgggatgccgtacccgtgtattcgagaatcgtttcggaccgaagacttctatcggacgaggtaatctctctttctcgacgatcaatatcgtgcgattggctatcgagtgcatgcaggtggagaacaaggaagagcgtatcgccctatttttcgctaaactggatcatatgctggaacttacggctcgtcagttgcatgagcgtatggagttccagaaaaccgcttacgcaaagcaattcccgttgttgatgtcttccttgtggttaggctcggaaaaattgaagcctaacgattcgattgcctccgttatcaaccaaggcaccttgggtatcggctttatcggactggccgaatgtctggtggcccttaccggtaagcatcatggcgaagatgaggattcgcaagccttaggcataaggatcgttacgtatatccgggatcgtgccaaccaattctcggagcaataccaacacaattatagcgtactggcaactccggcagaaggtttgtccggcaagttcacgggaaaagatcgtaagaagttcggatcgctccccggtatcacggatcgggattattatacgaactctaatcacgtcccggtatattataagtgcagtgcccgtcataaagccgaagtggaagctccttatcatgatttgactcgtggcggccatatcttttacgtagagatggatggcgacgctacccataaccccgaagcgatcatgcgtgtcgtggatatgatggataaatacaatatcggatacggttccgtaaaccataatcgtaaccgttgtctggattgtggctacgagaactccaccccgaatctggaagcctgcccgaaatgcggcagcaaacacttggacaaacttcaacgcatcactggttacttggtaggaaccaccgaccgttggaacaacgccaagctatccgagttgaacgaccgtgtcacccacaactaattttcaattgtcaattttcaattttcaattaccatgttgtctatcatagatatcatcgaagataccaccgtagacggtccgggattccggaccgccatctatgcggcgggttgcccgaacaaatgcccgggttgccacaaccccgaatcatgggacatccataaagggaagaaagtaagaacggaagagatcgtggagaaagtgctggctgacgagttcgccaatgtcaccttcagcggaggagatcccatgttccaaccggaaggcttcaccgaggtagccaaggcgatcaaggaaaaaagccaaaagacgatctggtgctacacgggatataaattcgaggacctgataaagaacccggcacaagccgccttattatcctatatcgacgtattggtagatggccgctacaaacaaacccttcgggatgagagccttttattccggggaagcagcaaccaacggttaattgacgtacaagcttctttaaataaaaaggaaatcgtaaaatacaagtacgatccttttatttaaggcttttaaggcacacacatgcataaaatcttgtacggaataagaaataaacatccgttctcttatatataaagagaattgcatcagcatctattcctcaattttcaacgtggtctgtacaaaccacggcgtgatttataaaatccacggcgtgatccgtacagaccacgtcgtgaattctaaaatagaagcatatccaacagagaatatataagtatccggataattattcttactgaagcgagacggatattagcatgatttcatacctttgcatccgaattggttccgtacgctcgttcgggcatacggattaaaagggaatccggtgagaatccggtacagtcccgctgctgtgaaactcctttaacattctaatactactttcgccactggcctagtaagccgggaaggcattagaatgggagtcagtcagaagacctgccattcatttaagattcatatcctcgtgggttagggtatagagaacacatatataagaacaaaaagaagatgatgacagacaaggaagtattgttattacggcgcaaattggatcttttgctccgtacgggaaaattgttgatggaaagtgccgccgatacgaaccgtatcgagcgcaacatgaagcgggtggccgcctttatggggattcccgaggagaaattgcatatcgatatccgatggaccatgattatggtgaacgtaagcgatgagcgaaactcattctccaaattccagaaatgcgagaaacatggtattaacatgacaacgatatcacaggtcagtaagctctcatggcgggcgatcgagcaagattattccttggataaatatgaggaagaattggaaaagatagttcgccaacctcggaattataccccttatatcgtagcgatcggagcaggattcgcttgtggaggtttctgtaagttatttggaggagactggatcgcgttcttgttaacctcgatctgtacttttatcggtttcagggtgcgtgcccgttgtgtcgaggctggccttaacgcctacatggggatcgctcttgccgcctttatttgtacttgtctagcatatgcctcatcttttctgggaatatccggtactccgtatctcccgttactggcttgtgccctattcatcgtaccgggcgtacctttgattaattttgtagacgatatgatcgataatcacttgctggtcggtattacccgtgccgcaaacacggtgatgatggtagcggcaatgactttcggtatcgctttcgccttgcgcctgctcgtgatgaacgacgtatcgatcgaccataaattcagcgaactaagcatggtcccgcatgatccgtattacgtatatgcgatagcggctgccatatccgccgttggtttctctatgatattcaatatccaacgccgtttattatgggtggttgctttaggcggtattatcgccgtatgcatccggaacttcgtgaacttcgagctgggctatggtcccgtgatcggctcgtttatgggaagtttcgttgtcagcctgatcgcagtgaaagcggttcattggttccatgtaccgaaccatgtattgacgatcccttctgttatcccaatgatcccgggagtattgatgtatcgctcgttattaggttttatcaaccttcacggggtgatcggcgaggttacgaacgccttctccaatggtattaactccgccctcatcatcctttgtatctctttaggcgtagccgtccccaatatcttcgcccgtcgttacatcgccaaagaccgccaacgttatctgcaagaggagttggagaaacgcaggcaaagaggtaagtttattgagtggtgactttagctgatcattcatgggtattcgcaccctcaaaatacatatttgtaggtattgccgagactaataagatatcggatatttgctttcgttattaaactataaaaacaaataggaatgaagactataggaatattctacggctcgtctacaggaacgacggaagggatcgcgaaacgtatcgcagagaagctgggtgtggaagacaaagatattcatgacgtatctaacgcttctcccgctgatgtagcgccttatgaaatcttgttattgggctgttccacttggggcgccggagatttgcaagatgattgggatagttatctagggaaactgaaaaagctggacttaagtgagaaaactgtcgcattattcggttgcggagactcagcctcttttagcgacactttctgtgacgccatcggtacgatctattccgacctgcgaaatacaggttgcaaattcattggcgctgtagatacttcgggatattcatttgacagttccaccgcctgcataaacggtatgttcgtcggacttcctctggatgaaatgaatgaagacgatcaaacagaagggcggatcgaccagtggttggcatctataaggaaagaaggaattgaatagacgcacacttttacatacataactgtttaaccttaatattacaacgtttgcgtattcaacttgattggtttagatttatgaagaggtatgtgggtcaaacatacctctttcttttcatctcagtttcctgaattgtttctttatccaaaaataatagccggttatcgcgaagatcgtccccaacaaggaaactaagcaagtcaatatacgggtagtcattcccccccacgagccgacgtgtacggaataaatccatcctcttatcttccccgattttgggagatctttatataattggacttccgtaatctcacccgtagcaggatcaaaggagtaacggtcgcttcctctcgtatttccataacgggccgtagaaaccgtagcggagccatcttggatcgtgattgagttaaagtccggataatggcttttcaatgccgataacacctcagcccattgtgtgtaatccgtctttttcttcgcgggtttcttcgcgccggaagaagctggagcatgatgcgcttgaggcgggtttgcactaataccgaagacactataaaaggcatttcgataccaaccaaacgaccatgttaatccggttaacgctaagataagcaggagcaatgccgcatagaatcccccggagacatgtaaatcatagaagaaacggaaccaaccagccttggtctttactttcaaccggtttctcaatacttttttattacggggataccaaattacgattccacttataataataatcgccaagaccaaagtcgcatagccaactattgattttccccaagaaaaacttccatcccgtttatactcatcaagtaaccaacgatgaagacgcatcattttcaggaaaaaaccttgtccgtcatccatcccggtcacctccccggtgtagggatcaataaaacccgcggcctttttccccggtaatatcagttgataagttcgtctcgggtcagacgatacccgaataccgtttattcgaaccgaatcgggtaattgttggcgcgccgattctatcaaggtggcaggcgagagaggttccccttttacttcctttacaaaataacgggaagggtagcctaattctaatatctctgtctcaaagacgagaatcgccccggtcaggcagacaatcgcaataataatgccaaaaggtatcgatagccataaatgtactttcgcaaagaattttctcattttccgaataattgtttaatcccgtcatatatacccggaaccgctaccgttccatggttctcgtcgggaaatgatttactaaagaaacgcaggttctccgcttgtggcaaaacctccgaaagaagataactcactttgtcaagatgaatgtccacccggtccgtcctttttttagacgcgacaccgatatacaggcttttccctttaaaatcccggcctgcaaccaaagcctccgcctcccggaccaaccgcccctgatcccaccacaaactagggtcgaccgctagataggtatcaaataattccgtatgacgaagaaacgtattcaaggtgaaaagccccgcatacgaatgaccgataagcatattccagccgttcgtgcgataggcactatcgatagcaggacgaagttcttccgtaagaaacttactgaaagcctcacttccccctccttgcggaatcgcatctatggagattttaccatcccgtccggcggctgaagtggtaggcgtaaaatcacgtgtccgatccgtatttaataccccgacaataatacaaggaggtagatatttacctctaccggatgccaacgttttccttatgcctaccagcgaatgaaagaaagaatctccatctagcaggtaaacaaccggatagcgttgtttcgtatccatattataatgctccggcaggtgtatccaataactccgctcttcttgcaatacggtagagtacaaaaccagttcctttcctatacaaatatcctcctggctccgcagggttagcgggagcaggaggaatattaaaagaatgtgagtccgactcatacttgcttattattcttgagcggcagtcaatttacctacaccactgatttgctctgcctcaacggtaagaccttttgtagcggtagctgtcttcggatcgatacgatacacggcaggttgacttccatcggtagtcgtaaccgccatataagcgataccatcctccgagaacggagtattgccaaatccggaaataacatccgtggaaggcagccccttcacgtaagtaagactcttatcctctcctttataaatagccaactctttcgcggcgaatccggattcagtcaacggacgatcatacatcaacaacaagaaataatcttccgtgatatgccaacaacgcaagaatgccttaccacccgtctgtgcctccaaattacaataataatcaggatcaaactcctccgcgttagccttaatacgaactacaccggccggcaaagtcgttttctgtacctccgcggtcatcgtcttagcatagctgggcgagaacacatacacatcgccgttgtctgccgtccaaatggtctggtagtattgagaacggttacgtccgcaagcataactgatcttatccgtctttatcagtttcgggttctcgaatttctcgttcgcataaatagcgacccaagcctcgttcggatattgcgtccattgcaattcccctttttcgtaagcgccactaccgcttcctccggattctgtctttaccagctccgggtatttaacatatgtacctccctccgctttcacgccgtacttactcaatcccatcgggatagccgcggaatagatccggccgttcgcttggagaatacccgctaacgtaacgaactcgccatttcccaaataattctccgacaagatcgtattcgtgtttgtcgtaaacgtctctttggccacatccagataagagagcaagaaacctttaggcagataaccattctcgtccgcatattcctcacccagatcaccggtagaagatgtaatgatatagtcaccgtagataccataagaagtaaatcgcttgatctcgtaagtattatcacgctctttaatcttaccttccgcattcagtacgtatgaagaagtaacaccggcatttccttgattgtaaaccaaacgatacaaatatttatccttatagaagatccattgcgtaccgctttccgtagtgagtccgttgtttttagcggagatagagccatcacccagcgtatcggctgtcaacaagtaattcgcatcaccgacagaagcggcgactacatagctcgaaaccacctccgaggtcgatcctccgccatttccattcccgttgcctccgttatccgggtttacaggatcgtcgtcactacaagaagtaaatactcccccaaccaataacgcggcggcaagacctgtcattaaataattcttcttcatgttgttttaatctattatgttttgaattaattattgataaataaaagatagtcacactttaaattaattaccgaaataaaccctcaccttaccatagaaagccctgccagccttctgcaagctgaagttatcgtataatttctcgttcgtgagattcctgcactcgaaagagatattgtaacgcccgttctgtataccataagagagtgtcaggttatgcgagaattgagttggtaccacaaattcggattcactgcctactgcctccgaatacagcgggaaactatgcatatataaattatcgtaagtgacacttagcgtattgcctttcttccacaaattgcgccagtagaaggtcacatccgagttggcaaactgataaggaagattcggcatacgtgcgccatatgtcaagctctcttggttcgtcccgctggtaaccgtcttcacgttatccctcacattcatctgcgtaaagtttcctcctacgcttacccagttagcgaaaccgtagcgaaccgagatattgtaacccttggtctctacacgaccatgattcacataggtagcgccatatttaccgccgctcaaatccgatatattccgttggatataatctttcgtattccggtagatcaatccgccttccacatatacggaatgcttaccgaatgtctcgttgtagcttaaattcagattcacattatcgctgttctccggtttcaaggaaatatcgccggtctcaaggtcctcatcgccaaacatctcctcattggtcggcagacgataggctttctcataggataatttcgcttgcaagcttttcaagataaagtaagttcccgcagccccatatcccatcgcgcttaccgaattggtcgtacgtatatagtcatcttgagccgaggaagtagcgacaggccccgcgataaactggttgtaatatttaccgaacacagacaagttccaatgttccgtcggcatcaagcgatacgaaagaccgctgatatttttacgggtttccttcgggatagcgttcgcttccgagtcctcgttcaaaagagactgattcgaacgccggaacgcgttgatcacgtgattgaacgtgaatgtatgtgccttaccgatacggtagttagccgttaaggttccgttccagttattattatccgaccgggtgttctgataagattgctcaccgggcatccggagcggacgcatctcgccacgccaattatattcataggaagaggtatctacattgttcgtcatgttcttattataattcgccgtcaataccaaatccaagcccctaacgaagaaatcacgcttgcgatagtccaacgacggcatgatcgagtatcccttccgatatttgccgccaaacaccacttcttggcgtacgcccgtctgtatatctttatacatatgtgaataggtaaacccgaacatcaaacgatccgcccatttcttatccacgaaaccgattttcccgataacggcctcgttatgatacgtatcatgaaaacgcttcacatgctcgatctttttcttattgatcgctccggtcgtaaagtccttcaccggagtatccacatagtaattattatccgaataattctgaaaaacgttgatctcatacgtgagtccgctccggaaagtttgtccgaagttcacataagatttatgcgtattgaaagacccgtatgaataagaagcatccaagaaccatttgttccggttcttcttggtgatgatattgataacacctccgatagcgtctgttccgaaacccaccggtaccacacccttatagacctctatacgctcggcataattcaccggaatgttattcagtccgaaagaactgccgacaccttcttgcggaaccccatcgataaagatcttgatatgcttgccggtaaatccatccatcatcagttgcatatccgagccgacaccgccggactcccggatcttcattccgggcgcttgagccaaggcttcactcaagttctgggtcgaattttgcaaggctttcgtatcgagggccacggcattgaacgcagaacgcttgagccgggtcacgccattagaaacgacaaccacctcatccaactccgtagcctgagggctaattaccacattcatctttgtccgttccccacgcatcagtttcacgggtttctctaccgtcttatatccgatagccgatactactaatgtatattctcctgcgggagcttgaagatgatagataccttcctcattcgtagtcccgccgtaattcgtaccttttagataaacggtagcgaaatccacggttgttttttccgtggacaggactttacccgatatcattgttttatgttgagaaaaagccgagatggaaataagcaacagtaaaaaggagaggaaaagccctctgattttcttcatcatcatttaatcaattatgttatttaaaacgttgcaaagttacgaccagaggcaactgtcccacaatacctaagaatgggtaaaatcacattaaaaatccacggaggtataccaaacaatccccttattcaggtaattggatgtatggagtaagttcgtaaaattgagttatgtcaaattttaaatctatttaaacccaatcgcaagtttttgagagacattttcttaataaacttcaaaaaggttaactatatttgcgagaaacagatgtttaattttaattctttatcaccatgacagacagaagaacatttttgagaaacatttcattacttactttagggggcatagccagccaaaaagtaatggcttcaaatcccaccagatccatacccgccacggatgcggtatcctcggcaaccgccgggaaaaagatgggattgcaaacctattcgctcggacaggagttactgcaagatatgcctaacggattgaaccgattggcaaaagcgggatataccgatctggagattttcggatatagggaagacactggtaaattcggtgattataatcctaaaaatacgacattcatcgcctccaaagattataagaaaatggtggatgatgccggtttgagaatcagtagctcacacctgaccccttctcttcgtgagtacacgaaagagaatatgcccaaattcgacgagttctggaaaaaggcaaccgatatccatgccgagctaggtgttagttgtatggtacaaccgagtttaccccgtatcgaaaacgaggatgacgccaaagtagtatcggagatcttcaaccgtgccggagagatcacgaagaaagcgggaatcctatggggctaccataatcacagcaatgagttcaaacgggtattgaaagcgggtgagaaaccggaagagaaaccgaatccgtgggcacctcctaagggtacttatatcgaggagttattcctgaaaaataccgatccggataaggttatgttcgagttggatgtatattgggccgttatgggacagcaagatcccgtggaatggatggagaattatccgaatcgttttaagttattgcacatcaaggatcgttggatcatcggtgattccggtatgatgaatttcccgaatatattcaagaaagcgtacgagatcggtatcctcggctactacgtggaactggaaggcgacaagaaaggccgtacccagttcgagggcgtagagaagagcgccgcctatttgcaagccgctccgttcgttaaataaaacatcccgatttatcccataaaaaagacagtgtttccgtagggcgatcatacgcttgggaacactgtctttttgtttattttgccttcaaaaaaacacgtacgtcttttttcggaaacacgtacatgtttttcacgaaacacgtacatgttttttcaaagggcattacatgattaaaaactcatctttacaccggcaaaataacttctcgggctagccgggccatagatataggaggaatcccggttcttaccttggtcaaagtcggattggtaagcgttgaacagattctgcacgcccccatttacttctagtttcagctctttgtaaagcgggaactcatacgcaagcttgatattcatatcaaaaaaatccggagtctccaccgccttatccaaaggtatatatcccgccaaatgctgcaccaacatacttcccgtataggttcccgacagggaagccgtgaaacgtttgaaaggcgtaagggtagccgtaaaataaccatagatatccggcgtacggaacatctttgtctcggctggcacattctcgtcatcgctccatttctcggcctctttataacggcttcgctggaaagtagcgcccgcttgcaaagatagccatgaagttaacaccgactttccttccaaggttaatcccatcactttcgccccggaaccgttacgacgttccttaatcagattgccttgctcatctttcccaatatcttccaagacaaacacatcacttaagctggtgtaaaaaccttccaccaagaagttcaactggataccattcttaaaacgatggtaaaaatcgaccgaagcactcaagctctgcgatttctcctcggataaatctttcgcacgctggatcatagcgacctctccgccgaccgccgagatatgcatatcctcatcgaacgcttgcggggcacggaaaccactggaataactagcccggatattgatatcttccgtcgggttaaaacggatattcgcacgagggctgaatattacatgatccatcatattatgtttatccaaacgaccgccaatcaagaagctccatcgcttatttttccactcattctgcaaaaacgcactctcgatatgcaccttctgattcgtaaagcgattatacccgatcatctcgtctttcaaatgatcgaaactatactccaaaccggcagtcaaatccgatggcataaacaagaatttatcaaaactataagcatattgcgtaccggccataaccgtcaggcccgtagtcttgccgtaagcgttcggatcttggttcgtcccgtaataactatcccggtctgtattctgggcagaagtgaaaacactccatttatgtttgtaatccttggagaaaagatcgaatttcagacctcctccatcaatcgaatgctccaactgttcggcgatatccgcttcatgaggcggacgatccaacagatttcctcccctgcggtattcattcatatgatgatactcgaatgtcaatttactataagtactcgttttcaggtacgaacggaaaccaaccgtttgattcttcaatttaggcaactccgtaaaaccatctccatcctgatcaaaaccggaacgatgacggttctggccaaaaagatataagcccgctttcccattttccgataccaaagaggcatttagggtcgtattattatcgaaagcagatgtcccgccgatcgaggttaacgtatgcgacaattccccggaatttctcaagggctccttcgtgatgatattaattgtcccggcgatagcggacgagccgaacagtgccgatccccctcctcgcatcacctctacccgctcgatcatattcgccggtatttgctcaagcccatatacgccggataaagcgctgaatatgggacgtgaatcaatcagtatttgggtataaggtccgtctaatccattgatccggacttgctggaaaccgcaattctggcaattcgtctctacccgtacacccggttggaaatttagtccttgtgccaaattcaccgcattggtcgtagtaaaaaccttcgcatccaatacattcactaatgtgggagccaaccggcgggaagtttccgcacgattcgcagataccaccacgccatccaaggcgatctggtcttcttccagttctacattaatctctaaggtttttcctttctttagggtcacttctttagagatagtcgtatacccgagcgctttatattctagcgtaaatttaccttccggcagattcttcaggaaataatgtcccgagttatcggtggtcgtaccgatcgtggtaccttttaacaatacgttgataaagggaagatgttcccctgttttcttatccaatacatgtccgaaaacatttgcgtctgagtcgtttagacggtcctctcccgtggcctgagctaccgttagggcacagcacaggcatagtataaagatgaaaaatttattcattttaatttattctgataagtaatacaatgttattaatctcacaatatcagaatatgggaggagcccgaagcgtacgtcttccccggaagggaacgatatagtccggatagaccggagcgaaagataagttacggataaaggaataaaaagccgccagcagaatagcgacgaaagccgcacctgttatctgcaagacagataactgatgaagcaactgaaactcggcgtagccatgttcatggtccggacgaccatcgtccgttttatgatacgggtgagaatggacgattgttaccccgttgacaatatgaacgtgggtaaacgcaataatacatcccaaataggctatgaacagcgcagggagtaatatcctcagatattttcttaatctatccatctcttttctctcgatcgcaaatatagtaatataaccgataaaagagatacgctgttcaaaaattacctatttgtaggtatttcatcaaccgagtacaccacgtacccgatcttcaaaggccgaaagggccgctttggcgccttctcccatagaaataatgatttgcttaaagggtacggtggaaacgtcgcccgctgcataaatacccgggacattcgtccggcaatgtgcgtcaatcacgatctcaccgggacgatttgtttcgacaatctccttaaagacaccactattagcggctaagccgatttgaacaaaaataccgtctaaatgaataacacgctcttcccctgtcttacgatcctttgtacggataccggttaccttgtcgccatttccaaccacctcggttgtttgtgaactaacaaagatctcgacattcggcaaactcttcgctttctcttgcaagacttgatccgcttttaactcatccataaactccaaaacggttactttcgaacagatccccgccaaatcaatagccgcctcgataccggaatttccaccgccaaccacggcaacatgttttcccttataaaacggaccgtcgcaatgaggacaaaaagccactccacgccctatatactctgcctcacccggtacattcaatttacgccagctagcgcccgtagcgacaataaccgccggagccttgaatatctcacctccagccgtagataaaaccttctcgtttccttctatcgttaccttctctatacgacgatgctccagcaggtcaatcggatattgccgcatatgcaagcgcagattgtcagccaactgggtacctgttgtctccggaactgaaatcagattctcaattcctaccgtctccttcacctgcccgccgatacgctccgccacgacagcgacactcagcccctttcgtgcggaataaatagcggcagaagcaccagccggacccccaccgaccacaaccacgtcatatcgttttactgtcttctccgtcaggctctcattgattccatactgagcttccagcttcgataacaattcaccgaattccccacgtcctacatggatcagttttccatccgcaaagacagaggggacgccttgtatcttcaaggcatcaacttccgcctgattgatagccccatctaccatctcatgatggatctgaggatttaaagtcgtcatagcgtttaatgcctgtaccacatccgggcaattcgtacaagtcaaagagacataggtcgtcagatgtatcgggccattcaaggctttaacacgattacaaatgctctcgtccggaaaattcttgcctttcccatctgaattcaagatcgccaacagcaaggaagtaaactcgtgtccattaggtactccacgaaacttaatccccgttttcgctccatcctttaataaaatgaattccaatccatccccatcagatactcgcatagatattttatccgaacaagaggcaacatcacctaataaatccaacaactcttgtctactttcatgcgcaggagagatcgatatatcaaaggtataattcgcatttaaccctgcgaatatacctttcaattgttcttttaatattgattctaacacgatctatactcttaattatttagattttccctaccaagtcaatgctaggtttcaaggtagcctcccctttcttccatttagcgggacaaacctcaccatcatgtgaagcgacaaactgagcggcttcaactttacgaagtaactcggaagcgtcacgaccgatattgttatcatgaatctcggccactttgatctttccttccggatttaccaagaaagtgccacggtatgccataccctcttcctcaatcatcacaccaaacgcacgactcagtgctccagtgggatccgccaacatcggatattggatcttacggatagtctcggaagcgtcatgccaagctttatgtacaaaatgagagtctgtacttacagagtaaatttctactcccattgatttaaactgctcatacttctcagccatatcgaccaactctgttggacaaacaaatgtaaaatcggccgggtagaagaaaaagatagcccacttacccaaaacgtcctcgttggttacagtcttgaaattaccattttgaaaagcttgtactttaaactccggaagttgagaattaataatcggttccatacttgttcctatttttaaatgaatactatttgtttttatttccgatacaaaaatataacatatttcttcattaaaacaatttttctaatcgatatattttatgaggttatagataacactttatcaatcaataaaaagggcctatcctcacggataagcccttcaatatcttgggttttggattactacataattagcgattataatttactttatatacttaattgattcttttgtatccgtatacggcacggtctcccaattcctcctcgatacgaagcagctggttatatttagccatacggtccgaacgacttaatgatcccgtcttgatctgtccgctattggtagcgacagcgatatcggcgatcgtagcgtcttccgtctcaccggaacggtgtgaagtaacggtcgtgtatccatgacggtgagccatctcgatagcgttcagtgtctccgtcaaggaaccgatctgatttaccttgatcaagattgagttaccgcaaccttctttaataccccttgaaaggaactctacatttgtcacgaacaaatcatctccgactaattggcaatggttaccaatacgatctgtcagtttcttccaaccagcccaatcattctcactcataccatcctcaatggaatcgatcgggtattcgttgatcagcttttccagataatccacttgttcgtcggaagtacgtttcactcctttttctccttcaaacttcgtgtaatcgtagattccatccttataaaactcagaagaagcgcaatccataccgatcatcacatccttgcccggttcataaccagccgccttgatagcggcgataattgagttcaaggcatcttccgtaccttccaaattcggggcgaaaccaccctcatcaccaacagcggtacttaacccacgatcgtgcaatacctttttcaacgcatggaatacctcagcgcccatacgtaagccttccttgaaagaagcggcacctaccggacgaatcataaactcttggaaagcgatcggagcgtcgctatgcgaaccgccattgattatattcatcatcggaacaggcatcacgtaggtattcgttccaccaatatatctatataaaggaatatccaaataatttgcggcagctttcgctacagctaaagaaacgccaaggatagcgttcgcacctagtttcgatttagttttcgtaccgtccaaagccaacatcgcatgatcgatacctatctgatccaaggcagacatccccttcaatgccggagcgataatcgtattgatattctcaaccgctttcaatacgcctttaccaccataacgcttcttgtcgccatcacgcaactccaaagcctcgttctcgccggtggacgcaccggaaggcacagacgcacggcccataacgccggactctagtaaaatatcaacctctactgtcgggttacctcttgaatctaggatctcacgtcctgtaatcttttctattttcattgcttctacgttttttaaactgacgcaaatatagatggattacttgaaccgtgaaatcaccacaaattgctattttcacctcaataatacctgaatgtaggtagagactacaacactcccgcccgcacccggctcaaagattcgggtgtcatcaataaatacgaggcgatatgattgacagaagcacgtttcgctgcttccggatattcctgttgaaaacgcagataacgttttcttgccgactcaaaacgccaagagtccgctttctcttgcgaaagcatcaaagcccactccagtattttctggtacaatctattaatagctaaagatgttttcaataaatcgctaaattccgaaaaagagatccggtgataaaccgtcggttccaatgcctcgattaataaacgcatcggttctctttggaatgtgctggctatacaaataacgatatttccctcacaggagaaatgctcggtaatatcacgtttattcttatagtaaaactggcgtaataatcccgattccacataatataaatatttagatatttgtccgttatccaacaataattctcctttcgcagccttacttgattctatgatcgaggccagagaatccaaatccgcatcgggtaatggataaaaacgtttggatatcatttcggctatttcttgtggtgtcttcatactattcatcattttctgatctatatcattttttatctccttacaaaaatagatatttgttgcatataacaaaacaaacacatattaaatagtcaaggttagtctaggcaaaaattattactatcgtttaaaagctaatcggattagattgttttccctgattagctgttgcataatcgcaaggcttgatcgagagatcaggccttgttattttctggtttgtagcgagagaatatcgctttcgcattatctaaacgttcttttgataagggttccaccccctttaacggataatcgaggcctaattgctcatatttataggttcccatcgtatgataaggcaataattccactttgcgaaccactttatatgaactgacataccgagctaacgcctccagccactcgtcattatccgtatatccggggacaataacatggcgaatccaagtatctatgccacgtctctccaattcatccaagaacagaagcgtattatcctgcttgacacccgccagtaacggatgtaaatccgggtttaaggttttgatgtccaataacactaagtccgcataatccaagacttcccaagcttttgaggtacatacgaaaccagatgtgtccaaagctgtgtgaagaccttgctcttggcacaaacggaaaaactctttcagaaactcaggttgcaataaaggttccccaccggtaacagtcacccccccacgggcgataaaactcttataccgtaaaacttccgtcaatagctcgccgggagtcatctgatatttcaccttccctttcgggttccaagtatccgggttatggcaatacaggcaacgcaacgggcagccctgcataaaaacgacaaagcgaattccgggaccatctacggtcccgaaactctctaatgaatgtatcttaccttttatcacttacagtgaatggttaatggttcttgaaataacatccaactgttgttcacgagtcagtttcacgaagtttaccgcatatccggatacacggatcgtaagttgcggatatttctcgggatgttccatagcgtcgatcaacaaatccttatcaaatacgttaacattcagatgctgacctccatccggagtaaaatagccatccaataagctaaccagattattgatctgcatttcacgctcctttcccaacgtagccggagaaacagcgaaagtataagagatgccgtcgtgcgcatgctggaatggaagcttcgctaccgaagctagcgcagcgatagcacctttcgtatcacgaccgttcatagggttcgcgcccggagcgaaaggagttccaccgatacggccatccggtgtcgtaccagtcttcttaccatataccacattagaggtgatcgtaaggatggactgcgtaggtttcgcatggcgataggtctcgtgctgacgcaaatattccatgaacttctcggtgatctctacagcgatactatccgtacgatcatcgttattaccgaaaggaacatattcgccctcacgttcgaaatcaaccgccaagccacgctcgtcacggatcacacgtactttcgtatcacggatagcggccaacgaatcggcaacgatagaaagaccggcgatacctgtcgcacggatacgctctacatccccatcgtgaagcgacatctcgaatgcctcatacgcatatttatcatgcatataatggattatcttcaaggcgttcacatataccttcgccaaccagcgcatcatttgttcatacttagccatcacctcatcatactccagatactcactgcgaaccggttcgaacatcggggctacctgtacgccgctacgctcatcccgtcctccattgatcgcatacaataaacacttcgctaaattcgcacgagcgccgaagaactgcatctgctttccgatcttcatgggggaaacgcaacaagcgataccataatcatccccataatccggacgcatcaaatcgtcattctcatattggatagccgacgtatcgatagagaccttggcacagaaacgtttccagttctcgggagcgttcttgaaccacagcaccgtcaagttgggttccggtgccggacctaaattatacaatgtatggagataacgataggaagttctcgttaccaaagaacgtccgtccactccttgaccgcccaacgactctgttacccaaaccggatcaccggagaacaaatcattgtattccggtgtacgtaagaaacgaacgatacgcaacttgatgatcagctggtctactaactcttgcgcctcctcttccgtcatcttaccctcacggatgtctttctcgatgtaaatatccaagaatgtagaggtacgtccgatagacattgccgcaccatcctgatcttttaccgctgccagataagccaaatacacaaactgaaccgcctcacgagcattttgcgccgggcgggtcacgtcgaagccataactagcgcacattctctcgaacgctttcaacgccttgatttgctcagaaatctcctcacggctctggataatctcttccgtgatctcttggatatccaaacgattcaagaaacgctttttctcctcgatcaagattgccgtaccatataaagcgacacgacgatagtcaccgataatacgtcctctaccatacgcatcgggcaagccggtgatgatagccgaacgacgtgcggcaaccatctcttccgtatatgcggagaaaacgccctcgttatgcgtcttacggtacttcgtgaagatttctttcgtcatcgggtctaaatgataaccgtaggcttccaagctattctcgaccatacggataccacccttcgggaagataccacgtttcagcggagcatcggtttgtaacccaacgataacctcattctccttatcaatatagcccggaccatatacatcgatcccttgaggtaattttgtctcggcgtcataaactcccttttctctctcgaccttaaacatctcggtcagcttgttccagaccttacgggtcttctcggaagaagcgactaaaaaggaatcatccccttcataaggcgtatagttactctggataaaatctcttacattgatctctctcttccaggtctcacccttaaagtgatcccagtactcattctcaaatttcataaacaatcttatctaataccacatttttaccggcacaaaggtaaaacttttatcctcatgttcctgtaacatttgcgacacccctctaaaatccctataaataggtattaaaaatatacaagaagaaacgggatagtaatgcgatgctttgcacgaagtctccattttattcactatctttgcctacagaacgtaaaagttaatctggatcaaacacatgagaaatatcctgtttaccgttttatttataggaatactatctttaatcgcatctcctatctcactcgcgtctaaatctttgcataaggcaaatatgattaatttgtcgaacaatgccattatttgcatgcatcaagatccggatggctatttgtggatcgggacttacgacggacttaacttatacaacggaaaagatacgtatgtatatcgtttcgaattaaataacaaaaactctctttgtagtaatatcattcacaaaatatccgacgcagaacccggctttttatggatatcaacctctttaggtatcaataaattctcgctaaagaaacggaaagtcaccgagtcttacccgggatacatggagagtgatctggtagcgaccgattcatccggtatcacattagccatttgtaaagaaaaccggatatcttgttacaccccatttagcgatggattccgggatctgccgagagaagggataggccctcaaaccgtacggactttattcgccggaacagacggatatttttatttactattgacctcgggaatactgaaaaagttaacaccggatttctccaatacaacttttaatttactatcggaagaacgccaattccataataaaccgatcttatccgcatttcatgagaataaccatatcttcattgtcgataccgacaataagttatatcgccaacaggtagacggaagcgggaaagaattcctgtttgatctgtctggaatgacaaataaatatggaaacatcattaagatatgtaccttccaatccaatgtatatatcgttttccgtaacggcaatattctagacctaagccaaccggaaaacacgatagacacgggcatcggtatcttttgcctgatgaacgataaaagacaggagattctttgggtagggaccgatggacaaggcatacggatgttttacgataaacccgatcttttcggctctatcttactcaaggatttaccgattaatatacagaaccccatacgttctttatatacagacaatgatcgatccctttggttcgggacaaaaggagacggaattgtccggatacaagcctatgacacttacccaaacaaaaaggcgattccacaaagcgctatcacgcatttcaccaccgccgacggattatccagcaaccgggtatatagcttccagagaagcgaattccatccttgtatctggatcggtacggaaggcccggggctctgttattattcttataaagaaaatcgaataaagacgatcccgcagcaagaggacactccccctatccgctatatccattctatttgtgaggtaaacgactcgacattatggttggcgacaaccggcaacggattactgaaggttactttacgtatggataaagtcacgcctacaatcagtaagatacaaaccttcccgctaaaaaacggggagaatacctgcaaagagattcaatccatgatatatgataacgactcgaccttatttctcgggagtcgtggcggttatggggttattagttttaacatattcaaccagaaatatgagttcctgcaaaccaacaatttaaggaatccggccattggagacgtgttatctgtatgccagaccgaggattctactttctatgcaggcgccagctccggacttacccggattaaatttaaaagaggaaagatacatttacgccaattcgataaaagcaacgggatcgcaaacgacatgatccatggcattcatgaggggaatgatagctgtatctggttaagcaccaataaaggtctcaccaaatataatccccggaataattttttccataattatcatcaaccttattttagcgtcacggaattctctgatgacgcttattggaaatgcccatactccgagcgtttattctttggaggcatcaacggattagtctgggtaaataaacaaacggagccggagcatacctatcaacccgaattaagtttcttcgagttgcaaatggataaacaaatccttccattatataaggacatcagccggaacggtgtaacggttccggctgatgtgcaatcgttaacgattgcgttcgtcgctccggattacatcaacggggagaattacgagtattcgtatcagttggtcaactataattcctcttgggaaaaattgcaaaagacaaacaaggtaactttcatgaacctcccgtacggggaatacttgctgaaagtccgttatcgtaacgatgtcattgattcgtcggcaaaagaatacaccctacctatcaaggtattacctcctatttatctaagctcattagctattttcacgtatctttttatcggtacggttttaatcatcattgccatctatcgcatccattaccaaatactaaagaaacagaaacaaatagcagacaagatcaaggaggagcaaaaagagaagctatacgagtctaagctgaatttctttacccatatcacgcatgagttatgtaccccgcttaccttgatcaatggcgtggagaattatatccaagcctatgccgccacctcaaaagacaagacattagaaaaatacacttcagtcctccgggaaaatgtagaggaactgaacgggcttatccaagaaatccttgatttccggaaagcggaagacgctggattcagtcatacgcacatccgaagagtatccgtatcctctcttttgcgaactcaattcgaatggttttacccactatccgagcaacaccaaatccaattcaagatcgatgctcccaaagagctttattggaatacggattccgtctatttcaagaagatcctagcaaatctgatttccaacgcatttaagtatacggaagacgggggcacggttcgtatctccttacatgaggaggagaacttcctcgtccttaaagtttacaacaccggcaaaggaatcgaggaggcagacatgcaaaatattttcgaccgatatcgtatccttggcacgatggataacgacgataacaggcaaaatacggcacggaatggcctcggcttatttatctgccacagcctcgtacaatccttaggtggtaaaatcgacatagagagtgaggtcggccaatatgctgaatttacagttaccttaccttttggcatcgtagaggagagctcagacgacacgatagacgaagatattcccgtatcgcttccttccccaaacacggatatacaaaagccgcaaatctcacatacggcacaaaaagagacggaagataaaccgatgatactcgttatcgacgatcataaagacatcgtctggctaatcacggaaaccctctcttccgaatatcaggttcaggaagcttataatgcggaggaggctctggaattcctcaagcaatacactccctcccttatcatcaccgatatcatgatgcctaatatcgacggattggaattgatctctcttatcaaggaaaatagatatacccgtcatatcccgcttattatcgtatctgccaaaatatcagaccaagagcaagcggcaggacttaatataggagcggatgcctatctaaccaagcctttctcgccaacagttctcctatccgtcgtgaaccgattgatgacaaatcaaagagaattaaaagagtatttctattctccggaaagtgcttatcaatatacggaagggcaattattacatcaagaagacaaggaattccttgacgccgtaaccgctatcatcaaagaaaatgtcagcaaggaaggactcggtcccgagctggtagcggacgcactgaatataaacacccgcatcttatatcgccgtttcaagaaaatatctaccatgacgccgagtgattttataaaggattataggttaaactatgcagcgcaattactcgtaaataccaacatgagcgttcaggaaattatttataatgtagggatttctaacaaatcatacttctatagggagtttgcccgtaaatataacatgactcctaaagaataccgcacaaaagaggcataaatcattgattcctaaatagtgtcataatctaccaaaagagtatcataatctgccatatgcatttcatgacacttcttcggtatttcaaagcactcttcaattcgttaagacctattaatattgctgtcgaataacaaagcaaaccgcttgtgtgtattcttccttcgggaagcacattattaacttttaatttaatgtttttatgaaccttaattccgcaacactattacaaatataactttttaagtacctgagcaacaaaaagttgctcaggaatttgccatgtcagatttttcacctatcttagtgttgcaaatcaaaatatgtatcaaacccgacagacatggcaaaggtagcaattaaatccgagaaactcactccttttggaggaatattttcaataatggagcaatttgactccagactctcatctgtaatcgactcaaccctcggtatgagatgcaggctgtatggttatcaatacagcgaaatcatccgttcgcttatgagcgtttatttttgtggcggctcatgcatcgaggatgtcaccactcatctgatgtaccacctttcgcttcatccgacacttcgcacatgcagtgccgacacgattcttagagccataaaggaactgacccaggataacatttcctacacatccgacactggcaagacctacgacttcaacacggcagacaagctgaatacactgctcctcaattgcctattgtccacagggcagctgaaagagggcgaggggtatgacgttgacttcgaccaccagttcatagaggctgagaagtttgatgcgaagcctacatacaagaagttccttggttatcgccctggcgtggcggttattggcaacttgattgtcggcattgagaacagcgacggcaacacaaatgtccgtttccaccagaaggacacgctgaagaggttctttgaaaggtttgaacaaaacaagcttattatcaaccgtttcagagctgattgcggctcgtgttctgaagagatagtggaagagattgctaaacactgcaagaccttctatatccgtgctaaccgatgcagttcgctctacaatgacatctttgccctcagaggttggaagaaagtggaattgggcggcattgagtttgagctggcctccattctcatcgagaaatggaaagggaaggcataccgtcttgtgattcaaagacagaagcggatagacggcgaactcgacctgtgggaaggagaatacacctaccgctgcatccttacaaatgactacgagtcttccgagaaagagattgtcgaattctataacctccgtggagggaaggaacgcatcttcgatgatatgaataacggattcggctggaacaggcttccaaaatcctttatgggagaaaacacggtgtttcttctgcttatggcactcatacgcaacttctataaattcatcatggcgaggcttgacgtgaagaggttcggactcaaagcaacaagccgcatcaagacgtttgtctttaagttcatctctgtgccagccaaatgggtcaggacatcaaggaagtatgtgctgaatatctattcatgcaacaatgcttatgccaatgtgttccagaatgactttggataacaccgacaacttatagtcgtgattttgcgtattgcctcaagtcgcatggtggggtaaggggcatttatatgtctttatggtgacattcgatgcactgtgccccctttttactaacgatgcagattcttttcgcttctgtatcatattaggcgcgtagttgcggatttgaggatgaaaaaaaagagtgaaggtaagacgaggaaatgcctgactttattaggtggacgaacctctttgttactttgtttatctttaatgtttcagtcctcttatgcggccgaagattctactgttcctgaaatgggaaacatggagattcatcagatcgcacagcaaagttcaaccattaaaggtgtagtaaaagaccaaaagggtgaacctctgattggcgttagtattgttgtgaaaggaaccacgaacggaacagcttcggactttgacggaaatttcaccttggatgtgccggataacagcacattggtattttccttcatcggcttcaaatcccaagaagttcgttataccgggcaaaaaacattgaacatagtcttagctgaagactctgagacactagacgaggtagtagtcgtaggttacggttcccaaaagaaaggtgagatcacctcatccgttaccagcgtgaaagcatccgactttaacaaggcaccggtagtgaacccgatgcaattggtggaaggacgtgtagctggtctgactgtatcacgtggtagcaccgacccgaatggcgaggtaaaagtacagatgcgtggtgcctcatctctgaaaggtagcaatgagcctctcgttattatcgacggtatgccgggtaatatgacttctttgaacgctatcgcacccgaggatatcgaggcgatcgacgtattgaaagacggttccgcagccgctatctacggaacccggggtaataacggtgtgatcatcgtctccacgagacgtccgcaagccggaactactcaagtggattactcaggatatatcatgcacgaggcggtttataaacggccggaaatcttaaatggagacgagttcgtcgcttatggcaaggaaaccaacaacgccaatatccgcgactttggtggacgggataaccattacgacgctttattgaataagagtaatttcacccatgtacacaacttgaccgctaccggtggtaatggtaagacaaactatcgcgcttctttaaattacaaaaagaatgatggtatgatccgtaacaccagccgtgaaacgatcaatggctctatcgccgtgaaccaccgtgcgtttgatgataaactacagctttctttcaatctagcaaactctttcgtgaaagtggacgcggtttccgatgatgtggataaggtaggagatatccctaattacggcatattataccaggcgatccgtatcaacccgacgatgcctatttataaggaagacggctccttctgggaaacttacagcggttacgaagatttcaacccggtagcccgcatataccagcgtaccaagaaaaaggaattcaagaatttattggcgaacttcaaggctcaatatgagattatccccggtctgacagccgccgctttcttcgctatggagaagaacgacgcattaactaacgattatagtatgcgtgaggaatatagccaatataaagacggtacaaacggacgcgccaaaaaagaatattatcagaataccaatcgtactactgaatggacagcaaactacaatacttccatcaacggcgtacacaatattaccggtttgctgggatacagttaccaagattttgaatacgagcaattcagcgccgagaacaaaaacttcttgacggacgtattcggtaccaataacctagaagccggcggttacctaaaagatggtaaggccgagatgaagagtaaaaaagagaccagcaaactgatcgccttcttcgcccgtgccaactataattacgacggtaaatacatggccagcgcctctatccgccgtgaaggttccacaaagttcggagcgaacaacaaatgggcttggttcccctctgtcagcgcaggctggatgatctctcgtgaggacttcatggagagccaagaagtattcgacgtattgaaattccgtgccggtttcggtatcacgggtagtctacctaccgatccatatatgtctctcgctacctacggcacaggtgctggagcttggaacgcttacaccggttcatggctaaccgccacttacggtccgaatatcaacccgaatccggatttgaaatgggagaagaatgagtccttgaacatcggtttcgacttcggcttgctaggtggacgcctaaatggtacgatcgattggtatagtcgtacgactcgcgacttgatcagtagctacaatgcccaacagccatccttgatctacaacacgatcaccaccaacgtaggcacgatgagaaatagaggtatagaattagcattaaacgcagaggtcgtaaagactaaggatttctcttacacggctaatttcacgttctcatacgagaataataaattgacatctttgtctaacgacgtgtacaaatcttcttacgaggatcaatatgacctgccctctccgggtaacccgggcaaggcttaccgcctacaagaaggacagccgatcgcgtcattcttcggttatgtatgcgatggtatcaatccggacggaacttggaatcttcgcgacatagacggaaaggaaggtctgtctgacgctgaccgtacctttatcggtaatggtttgccgaaattcaaggctggcttacagaacacatttacctataagaactttgacttcagcttcttcctgcgcggtatgtttgattatgacgtattgaacgagggtgctatttatttcggaacgactgttaatattgatcagtctggcacaaacgtatacaaggatgccttgaagaacaaggtaacagagcaaccattgttctcttcttattatctagagaaagggaacttcttgaagatcgataacgtgacactaggttatacattcaacttcaaaaataataaatatgtgcgcaacttacgtatttatggtaatgtcaccaatcttgcgactattacaggatactctggtttaacccctgacgtaaacgtaacaggactacaagcaggtatagagaagcgcggatcttatcccaccacccgtaccttcacgtttggcgttaattttggattctaattaagtaacaatagatttaagacaatacaatgaaagctttaaaaaatatatgcgcaatttcattattgctgggagctaccgcatttacctcttgtacggacctgacagaggaaatacatagctcggtaatcgctgagaattattacaacaatgcaggcgaggtaatggccgccatgatgcgtccatggggacacttctgtggaactatgcaagtagcccaatcgccttggtcatgtaacgagttatcttccgactgtgccgcatggcctcaaaaaggtcgccacggctatgacaatggagactggattcgcttacaccgccatcaatggattcctacggatggtcaagtagtggatgcttggaaaaaattatttgaaggtatcggatatgctaacaacttccttacagatacagagaatatagattttgaagcactccaagttccaatgtctaaagcacaagcacaagcggagatgcgtgtatatcgcgcttactgttattggtatgtgatggatatgttcggtacggctccaatttgcgagaaaatcggtgaaatcaatccttcctccaaatctcgcgcagagttattcgcttggatcgaaaaagagttaaacgagagtattccttctttgtcagagagtaaaacagagacctacggacgtgtatccaaatggggggcttacgcattattggctcgtctctatttgaatgcggaaatttatactggacaagcacgctgggatgattgtatcgcagcttgcgatgaattagctaagggaggtttcgcattggataagaagtggaacgacactttccgtgcggataacgacaagcgatctaccgagattatctggtcaatcgtgtatgatgaagtatatgccaaaggaatgggttggtatcaacgttggttgcattacgcacaccaaactggctgggatttgcaatccggtccttggaacggcttggtgacacaaccgaccttttatgactcattcgctgacaacgacttgagaaaaattgagggtttcttgatcggtaagcaatatcctcgcaaagtagatgaaaacggtaattactactacgacacgaccgcagagcctttgaaaggttcagaggagtacaatgggcaggatttggtattcgtaaactacattaagtccatgaccgagggcgaagaaaacagcggcgctcgctctatcaagtatgagatccaaccgggtactaccggcgatatgaacaacgactgggtgatgttccgttattccgaggttatctataacaaagcggaggccttgatgcgtaagaacgggggcaaagcaacgcaagaagtggtagatatgatcaacagcgttcgtcaacgttctttcaaggcagaggattgggagaaagcgaaatatacgaccgctacattgacaatggatgagttcttagccgaaaaaggtagagagtttgctttcgaaggaatccgccgtacagacttggttcgttttaacaagttcgtaaccacttcttggtgggacaagactgcatccaacgaaccaaagcgtaatatcttccctattccgcaaagacaattggatgctaacgcaaacttatctccgaacgaggctaactcattgttctaaatatcaactaagtatagtagaaatccattattaacaaattagcacttgacaatgatagaggactactatacttattgatctgaaaatataaaaggttacctttgtcactatcaaaggttatccttggaactatcaaaggtgaccttttatgtttcatccttttctaactaattgatacgacatgataaatctcaagaaatcgatgtgttgcctctttctggcagccagctcaacagtagcgatcgcacagaccagtgtagttgatcttgtaaacccgatcatcgggacaaatggaatgggacatacattcccgggcgcttgtgtacccttcggactcgtgcaactcagtccggatacagataccataccacacaacgtagatggtaaataccaacctcgctcctacgagtattgtgcgggttatcaacataaagacagtagcatcgtaggtttcagccacacccacttcagcggtaccggccactccgacctcggggatatcttgattatgcctaccaccggaacgttgaagctaaaccccggaacggccacgaatcccgatggcggttaccgttcccgtttctcgcatggcaccgagatatcccgtcccggatactacgaggtgatgctcgccgattatggcgtaaaggcacaactgaccaccacccaacgggtcggcatccacaaatacacataccctacgaacagtgagaaccaacgcattatccttgatatgattcacgggatctataactatgacggcaaagttctttggaccaatattcgcgtagagaacgatacgctggtaaccggctatcgtatcacaaacggttgggcacgtaccaactatacttatttcgccatgtctttctccaaaccgatcacgcattacggatgcgaagagaaagcgaaagttaattatcggggcggttatgccaagttcaatatgaaagagaacttcccggatatcggaggacgtaagatcgtcgcttattttgatttcgatccgaaaacgtctgatgagttggaagtgaaagtcgccctttccggagtcagcaccgagggagccttgaaaaatctacgtgccgaggcttccggtgcggacttcgaccaattagccgccaaagcctccgatacttggaataaagcgctctccgtcatcgacgcaaaaggaagcgatgatcaattggctatgctttacacctccttgtatcacacgatgatcaatccttgcgtatatacggacgttgacggtcaataccgcggactcgaccataatatccatcaagcggacggattcacgaactatacggttttttccgtatgggatacctatcgtgccctacatcccctgttcaatatcatcaaccgacaagttaacacggatatcgccaaatctatgttgaaacattgcgagcaaagcgttcatcatgccttgccgatctggagccatatggcaaacgagaactggtgcatgatcggttatcattccgtctctgtcttggcagatgctatcgccaaaggattaccgatcgataaagacgccgcgttaaaagcgatgatcagcagctctacgattccgtattatgagggaaccaaagagtttatggaattaggttatgttcctttagatcgcaacggtagcgcaggctccttgactttggagtatgcttatgatgattggacaatctataatacagctttattagtgggaaaccgatccgtggccgatacctataaaaagcgtgcgtccaattacgcgaatgtattcgatacctcgatcggatatgcccgtccccgttatacgaatggtaaattcaaagaggacttcagtttgttaagcacgcacggtgaagggtttatcgagggaaatgccttgaattattccttctatgtccctcaagatgtcaatggtatgattcagttgatgggaggcgagcaagcattcatcactaaaatggattccttattcacgatgcatcttcccgatgagttctttgccgagaccgaagacgtaaccaaagaaggattactaggaggttatgtacacggcaacgaacccagccatcacatcccattcttatacgcatggaccagccagccttggaaaacccaattctggcaacgcgagatcatgaataagatgtatcgcaacaatatcgacggcctttgcggtaacgacgactgcggccagatgtccgcttggtatatcctttccgccatgggattctatccggtttgcccgggtacggatcaatacgtattaggcgctccttaccttccctatatgaaggtccgcttggagaatggtaagactttcgaggtaaaagccgataaagtcagcgacaagaaccgttatgtaaaagcagtaaagctaaacgggaaaccctataccaaaggatacatcacgcaggatgacatcatgaacggtggaacgctcactttcgagatgacttccagcccgaacaaaaagcgattgttcaacggagaggatcgcccttattcactgacggattaacccattttatcagaaaaaacagacaagactcatgaagtataaacaattaatcagcggtgctttcctgctgtggacttgcatcgcttgctccggcaaaaaggaacaggcggctacggtagcggaagccacctcaagtccttgggataattattacatcggaaagatcgatttcaagaatctttcccccgaggctaagggatcggcgatctatgcctccgtcatcccggatccggaagcttatattaccaagcatgcccgcaaggttgtagaaacactgtatttcactcccgaagatagtatcccgggtatcgaggaaatccactatacattaaaggaatacgacggggtatccgcgaaagacggagcgcccccctccatcagtatcgtatacagcacgaaatggatcgagaaaagttttgccaataacgacaccgcgaaagtggattacgagacccgtggcgtattataccatgagctgacgcatggtttccaattggagcctcaaggcataggtagctatgggactaataagactttctgggccatgatagaaggtgtggcggatgccgtaagatacttaaacggcggttttaccttggaagatcgtcccaaaggcggccattatatggatggttaccgcacgacaggcttcttcctcgcatggcttacgcaaaccaagagcccggatttcctgcggaagttcaaccgaagcacattagaggttattccttggtcgttcgatggtggcgtgaaatatgcgctcggcaatgattacgacatagactccttatggaaagaatatatggcaacgatgggagatgaagcgtagccccggcaaggctacgaccaacggcggtaacactcaacaagttaccgccgttcttttatagtatcactcccgaccttccgccaataggcattataaggtcgcaacaatgcccatcgtaagctccttatactgcccatcctaacaaccttacaatgggcattgttacattattcccctaaaacaccttccttatttgcatttccgtaaacatatatctacttttgcgaaaaagtaaatatggaactttatacccgaatcctgttgccgaaagcacgattctctttctcgtatgaggaccgggtcgtgatgatgggctcctgcttcgccgagaatatcgggcggaaactggaagagaataaattctccgtagatataaacccattcggtactctgtataacccggcttccgtagcggaaggattgcggatgctgctacgcccggagtatttcactcccggcgatttattccagcatgagggcatataccatagttttacccatcatagccgtttctccgctccctcggaagaagaatgcctaggccatataaacagccgcttatccgaatcctccgatttcctgcgaaaagcgacccggttggtaatcacgttgggaaccgctttcgtctaccgcctcaagagcgacgggcgaatcgtgtcgaattgccataagctaccggaaaagatgttcgatcggcaacgattatccacgcaagagatcgtcgaggactggaaacctctgttactagccctttgggaacaaaaccccgccttgaaaatcttatttaccgtaagtccaatccgccactggaaagacggggcgcacgagaaccaactcagcaaagccaccctattgctagccacggacgccttacagaaagattatcccggccgaatcgcctacttccccgcttatgagatccttatggacgagctccgggattatcgtttctatgcggacgatatgctccatccctccccattggccattgattatatttggcaacgttttatcgaaaatttcttatccacagacacttcggcaatccttaaagaatggggtgatattcaaaaagctattaaccataagccctttcaaccggatagcgaggcctataagcggtttatccttcaaactttgttaaagatggaacgaattagcgagaaaattccttcctttgatatcagaaaagagatcgaaatagtaaagtctaaactaaaataaaagaatggaatacgcaattaaagaaatagcaagagttatcggtgctaaaacaaaccaattgcttgacgatacggtcagtttattgttgactgacagccgtcgtctctccttcccggaaaaaagcctcttcttcgccttgaaaaccaagacgaacgacggacatagatatatacaggaactctataaacttcgtgttcgcaacttcgtggtaagcgatatgctaccggagttcgagagcatgaaggacgcaaacttcctgatcgtaaaagatacgttacgagctttacaaaaactggcgactcaccacaggaagcaattcaacatccccgtgatcggcatcaccggtagcaacggaaagacgatcgtaaaggaattcctctatcaactgttgcataacgagttcaacatcgtacgttcgcctcggagctacaactcccagttgggggttcctctctcggtatggcagatgagcgagaaaaatacactgggcatcttcgaggccggtatctcacaaccggacgagatggaacgcctgcaacccattatcgcccccacgatcggtatcatcacgaatatcggggaggctcatcaagagaatttcctctcctccaatcagaaatgtatggagaagctgacgcttttcaatgattgcgaagccattatttatgatggggatgatttatttatcgccaattgtatcgaatcggcttgcctttctcataaagcgatcgcatggagccgtacggactccgaggctcctttgtttatcgagtctatcgataagaaagagtttgagacgatcattcactgtactttactgggcttcaaccgggtcgttaccattccgttcacggacgacgcttctatcgagaacgtgatccattgtatggcggttatgctttacctaaaacccaccagcgtaaacgacgtaacaaaattcttgcatcttgagccggtggctatgcgattggacgtaaagcaaggtatcaacaattgcctgttgataaatgatacctataactcggatatcaactccttggatatcgcgctcgatttccaacaaagccgccgggtaggcaagcaattaaagagcactttaatcctctccgatatccttcaatcgggcaccttgccgaaatctctatataagaaggtcgccgatttggttcgccgtaagaagatagatcgtatcatcggtatcggccgcgacttaaaggaatatgcttccgtcttcgagatcgagaaggagttttacacgaccaccgaggaatttatcaagtctccttccttcaagaaattcaaggatgagttgatcttgattaaaggttcccgccatttccatttcgagcagatctccgagttgttggagaagaaagtgcatgagacgatcctagaggtaaatctggacgcgatcgtacacaacttcaatcagtatcgttccaagctaaagccggagactaagatggtttgtatggtaaaagcttttggttatggagccggctcttacgagttggcgaagacccttcaagaacatcgttgcgactatctggccgtggcggtagccgacgagggagccgaattgcgtaaagaaggcatctcgatccccattatcgtcatgaatccggaattcagcagtttcaatgtcttgttcgagaaccatctggaaccggaagtctatagcttccgcctattggatgccatgatccgggagaccgagcgcagagggatcacctcttaccctatccatatcaagatcgataccggcatgcatcgcctagggtttcaaccggaggatgtcccggcgatctgtgaacgcttgagagcgcaatccggggttatcgcccgttcggtcttctctcatttagccggaagcgactcgtacgtcttcgatgattttacccatcaacaattggataaattcaccaaagccgcaggggaactagaaagcgggttagagtataaggtaatcaaacatatcctaaactccgcgggaatcgagcgtttcgccgcttatcaaatggatatggtacgtttaggtatcggtttatatggagtaagcgcatccggacaaaaaggcttacggaatgtcagcaccttgaagacaacgatcttacaaatacaaaacgtacccgcaggggattcgatcggttatagccgtatgagttatgtgaaacgtgattcccggatcgctatcatcccgatcggatacgccgacggactggatcgccacttcagcaacggaggtggggaggtcttgatcaatggacaacgctgtccgattatcggcaacatctgcatggacgcttgcatgatcgatgtcaccgacatccatgcgcaagaaggcgacgccgtaattattttcggcgacgaactaccggtgagcgaactttcggataaactgaaaacaatcccttatgagatattaacctctatctcgcctcgggtaaagagggtttatttccgggaataagaagtaaccgccaacaaagaatggctctaccttgttttaatatcaaggcacatattcaaatgtcaggctatgatattcatttgcgtatgttgcacattttgtgtatgtttgtgccgtaattaataaacaagaggtatgagtcataatttattgaaaggcaagagaggcattatcttcggtgcgctgaacgatatgtctatcgcctggaaagtggcagaaagagccgtagaggaaggtgcgactatcacgttaagcaatacgcctatcgctgttcgtatgggtcaggtagatgctttggcggagaagttgaatgcgcaggtaatcccggcggacgcaaccagcgtagaggatctggagaccgtattcgcgaagtcagtggaaatattaggtggtaaaatagatttcgttttacattctatcggtatgagcccgaacgtacgcaagaaacgtacgtacgatgatctggactatggaatgctggaaaagacgttggatatctccgctatttctttccacaagatgctacaggtagcaaagaaacaagacgctatcgccgagaatggttccgtggtggcattaagttacgtggccgcccagcgcacgttcttcggatacaacgatatggcggacgctaagagcctgttggaatctatcgcccgtagtttcggttacatctatggccgtgagaaaggcgtacgtgtgaacacgatctcccaatccccgacaatgacaaccgcgggtagcggcgtgaagggaatggaacacttgatggacttttctaacaagatgagtccactgggtaacgccaacgccgacgagtgcgcggactattgcgtaatgatgttctccgactttacccgcaaggtaacgatgcagaacctataccacgacggtggtttctcaagcatgggtatgagcctccgggccatgaaccaatatagtaaaggattagaggaatatacagacgagaacggacacattatctacggctaatatgttagtgagaatctatccggagaatccgaatcaaaaagaaatagacaaggtcgtcaaagtcctgcaggacggcggccttgtcgtttatcctaccgacacggtatacgccatcggttgcgatgcgctgaacgtacgtgcggtagagaaaatatgtcagatgaaaggggttaatccacagaaaagcaacctgtctatcatctgctacgacctgtctaatcttagtgaatacgccaaggtaagcaacgccgctttcaagctgatgaagaaacatctgcccggtcctttcacctttatcttacccaccagcagcgagcttccaaagatttacaagaaccggaaagaagtcggaatccgtgtaccggacaataacatcacccgtacattggtacaatccttgggaaatccaatcctaaccatgtccatccgtgacaaggatgaggtgatcgaatatacgacagatccggaattgatacacgagaaatacgagcatcaagtggatatcgtaatcgacggcggtttcggaggattggaagcctctacggttatagattgcacgacggataatttcgagatcgtacgtcaaggcaaaggagaattgtagctatccaccacgatttgtattcgctcttccggcagattagcgggaaactccaagcttatttcttgttggtcacccggcattagcgtaatatagttatccgaataatgtaccggtaagattcgtttgcctgtctccttatcaaagaccttgatacggttgaagaacgagatctgcgaatcagcgctcagacggactgtacctacgaaattcgatccttccttcttgatctcggtcttgattcccggtcttgacttcggaagttgagataagctggtgtagtctttcggctcggttgtcagccaataaatattggggacatccgcattcaaggccagccgtaagaaataagcgcctttgatcccttccggaacggggatatccaataattcctgtaccgtattcgccttggcgctcgctctcgtctctttctcccaaagcagtttgccttccagattatagatacgggctacaatcgataaatccgtataatctttcagggtcgtattcaacaatcccgccttacgggttaccgggttataataggcatgtaagggctcacagcctttccgggttccgtacaaggaagcatttacatcgagagaccaatcatacatttgcccccgcaaggatgtccatggattctgggttttccagatcaagatacccgtataccaatcccacatatgagaggcccagccttccataaaactacgatattggtcatagttcacgacttgggcatacttacaataagtctcgatatccttcacctccccataacgctccagatgatcgccatagcccagatccttatgataccgccacgtataattacgggtcaaacctttccttgggaaaccggccaaatcctgttccgtcatcatctcccgcatactctcgacctccggggaaccaaccgatccggcttccggattaaacggatgcgaacggaagctaaagaaccattccggctcttgtataccgtaaggaccatccccattatcccccaaaaaattccgggtaaacaacgtatctgtcgagaaactcacgaaaagacgctccggatctaaccgggggaaaacctcctttctcaaacattgatcgatatctttagctaaaggccattcattcgccccacaccagaaacaaagactcggatggttacggatcattttcacttgatcttccacggaggcgataaataaatcatgattatcgggatattcccaacgacgctctcgggaatccatcttggtcgggtcctcccaagcgccattgcaatcaccactgccccacagatcttgaaagactaagataccgaactcatcacaggcgttatagaattccggccgttccaccaacgcacctccccatacacggatcatacgcagattcatttccgcatggaaacgtacctcatcccgataacgttccggagagagacgaagcaaccaatcggaattaatatagttaccacccgtgacatatattttctgtccgttcacgaagaaacggcgtcccccgttatccgggcatttatcggaagtaatctcccggataccataacgcaaccgttcccggtcactcacttgattcccgatctcaaaagagaggttcatatcatataaaggctgctcgccgataccgttaggccaccataaacgaggattctttaccgctaaaggattcaaggataccgttttcttctcgaatggcgataaagtaaccggctgggttaagcgggttccgttcgtctcacaaaccaatagcccctttaaggaagtgctcccggtattctctagctcgacagaggtattcacaaaagcctccttttgagttttcgtttccggatcacgtacgccgggtaccttggtcacgacataaggaaaggagaggcataccggcccggttgtcgtaatagatacctcatcccaaatacccgtattccggtctcgtacaggttgtatccagtcccaacccggcgtatattgcatcgtattattccgggcgatctgcccatcacccccttgtccgccatttggatttccgacatgtgtaggtggataaaccaataccgctaatacattcggggcatccgtacgaagataaggagttatattaaacgtcttcctcaagaacataccctcatgggtattccggttgatccgcttaccatttaaaaagatttccgccttataattgattccccggaaattcaaccagacattacgcccctctggtaaagcatcgatagtaaactgacgggtaaaccaatacgtatagaaatcattgccgacttcatgtatatcgggaatcaaattgttattcaacccaaactcaggggccggatacaaaccattctccaaaagcgttgtcaacaccgtacccggtacacgagccggtaaccatcctgttttatccaaaggcaccgcgctcaaccggttcccatccattttcacctcattcgctttccgggcataccaatctgagtgaatcaaggttttctctcccggttccgggatcaccaacaaggcttgcccctccgcggatacgggctttgaccagcaagccaggcaaagccaacaaaataaataaatacatctgttcatcatataatcttagatttatccttctaaagtagtacaaaattcagaagggcctcttcgcaaactcgaagaagccctttcattacatattatttaacaataagacctattaatgccgattagaaattacctacaccagctttgtcccaccatacatgagtaccacctttatcaccagagatcgaacccgtattctcttgattcagcagctcgatgcctttctgtaattccgcattattggtgttaatttccgtatctgagtagatcaagcgacgaacttgttcgttagtattgatatcaccgttactcaagtttacacgattcgggaataatttaggatagcctgtacgacggtattcagcccaagcctcacaagacaatgggaagttagcgatccatttctgagtaatgatacgttgcaacttctcctccttactagcaccttcgtcccatttaacacctagtgtattcatcgcctttatactattttccgccttaaccgggtcaacaaagtcaatctgtccactggttccattgagataagcgtctatttccgcatctgagatagaagttacacctgcaatactgcccttataagccaattcgttcttgatagaaatacgaatgccctcctcatatagatctttagcgctacctcccatgctccagccacgtaaagcaccttcagcacgtaaaaaataaccctcagcaactttcatgacagggaaagcggtcgtataagtgcaaatcactttagagaaattaccccattgatttggcttagaaggtaagttacatccgccgcgaacaccaagatactttgtcccctcctcaattgtcgagccatcttcacaagtaacagccgcttgattcttggtcacatacaaaggtaaacgaggatctttgaaaccttccaacatcgtgattaagctagcattcattccacaatcaccccactcaaacatacgagtcaactcattgctcaaaccttggttgatcaagatatcacgatcagcggaagtcaatacgcctccttgaacggcttcctccgctttttgcttcgccaatgtagggttcacctttacgatacgcatagccaaacgtagtttcaattgattagcgaccttcttccacaaagcgatatcaccattacaccaatagtcaaatgcttgcatatccgcaacagatgcagttcccttaaatccagcgatcgcttcatccaccaaagtaaacaaagcattgtagacactttcctgagtatcataagagaaagaagctccacccgtaggatcttcgataacagaactataggccactgggccataggcatccgtcaacatctggatcgcataagcttgtacgacacgcatcatcgctccataatcacttaagccttgctcatcacaagaagcaatcagacgacgggtattgttgaaaatatgaagatatacattctcatacataccaccacagaaaccacggttcaacgcataatcaacattaccggaaccattaaagttatgtggagtcatgaagtagccgctaaacaaatcaatatttaggttgaagcaatattggaacaagttctgctgcggagcatagacataagagaatggctccttaaattgggcagagaacggaagttcatctggatcaacctcatagggatcagtatttaaattttcaaaattatctgtacagcccatggtcataacaccggtagatactaccaaagccgatacagcggcatattttaaaattctatttagtttcataagatatactcaagatttagaaattaagttttaaattcaaaccaaagctacgagatgttggcaacgcaaacatatccacaccttgccagccattgcctgtaccagccgctacatccggatccataggagcatctttatagaagaagaacaaattacgtccaatgatagaagccgtcaaattcttattcgctccaaataagttacggaacgtataaccaaatgacaactcacgcaaacgaacattagtcgcattgtaaacatactgagaagtcaagatattagagttataacttgtacctccagtcgtcgtgtaatatgctttaggatcaaatgaaacaccatcaatcacaacttcacctgcatcacgagcggcacccgaacgctctgatacgccccaaccatccaaggtagcttccgtcattgacaagaccttaccaccgaccttagcatcaatcaagaatgacaatgtaaaatctttgtaatggaacgtgttagtccaacccatgtttacttttgcgttcatatcaccgacatataccaaatccttattatccgtacctcccaactcaggagcgccagattcagttttcaccggcttaccattatcgtctctcttgaaatcacgaacatataagtcaccaaaatgaccaccttcagtcaaaatcactttcgcacctgtacaatagctagctaatgtccaatctttcaactcattcgataattcaatgattttattattattgtaagagaaattgaaattcgtactccagctgaaattgtccgtaaactgattataccaacctaagctaacctcaaaaccttggttttctacgttaccggcattgatataacggttcttcaaaccagtttcccaaggagcggtaatattaaaatattgattcttcgtattggtcttataatacgtcaagtttacattgaaacgattctggaagaaagttccatcaaaaccaacctctaaagagttcgtcttctctggcttcaacgttctaaaagcagcttcttctggcgggtcgatagatccttggtcaccaatcgtataacgtttattggaagcatagataggcacatcgttacccacgatagaataagaagcacgcaatttaaataggtctacattctttccaaagtccaagaatttatccaatagagcacttacaccaacagacgggtagaaaaaggatacaccatccgtaaacgccaatgaagaagaccagtcgttacgagcgctgacatccaagaacaaaccttccttatatccaaactgagcagtagcgaacacagagttcaagcgtttttctttcagagtctctgtggtttgcatcgtataatagttcttcggggagaagatgttcggataataagcacccggggttatcacaccgttatttactttaaactccttatcaccccaaccgatcaattcgatgctagatgcgcttgtcttcgtaaagctaccaccagcagtaacggacaatgaataagtctcatcccaagttttattataacttgctaacgcatcggcatatgtttgctcactgaaagtccgggtatctttcatggtacccaataaatttcgtcccgcggtactagacgcatattcgttcaagatccatttttcatcaccacgttcataacgcaaacgccccgtaacagaaagaccttccatgatatcatatttaacactaccaccaaattcataacggttacggtccgtgataggagtctgacgattcaacatccagtaaggattggagaattgctcttgtttcgtattcgtccagttatgaacattcacgttacgaaccccgtcatatacttcatagttactcttgtagtaatcccaatcctcacctctcgggaacaggtaggcacctgtaatcgggttattcaaataaccggcagaaggctgattctcgatatgctgcttgttgtagcgggcacttacatccacatgtactttcttccacaagttaaagccaaccttagccattaaattatgacttaaataatcattctccggcataataccattcgatgagacattcgcataagagaaataagaagaaatattctccgttccaccagataaagagatagagttattcgttgtataacccggttgatagaatttacgtgcgtaattcggagatgtagctcctaatttacttccccagctaaatgtgccctcgtcactcataccataattattttggaatttcggcaaagacatggctgattcgaccgtcgtattactagatacattaatagcgaccttaccggcttgtgcggattttgtcgtaatcatgatagcaccattggccgctaccgcaccatacaaagcagcggcggaagcacctttcaacaatgtaatctgcgcgatatcatccggattgatagtagacatagcgtcaccaccatcacgttcgccgccataggccatcttcacctgcgaatcagatacgctcatcatcatagggacaccatccacaacaatcaacggttggttactaccgctaatagacttattaccacggaataagatcttagaagaaccacccgcacccgtagagttcggggtaatctgcaaaccagcgctctttccttgtaaagagttgatcatattcacattcttaatctcgttcaagtccttaccgcctaccgtttgtgcggaataagtcaaagtctttgattcacgtttgatacccatcgctgttacgacaacctcatccaaagcctctgcgtctgaaaccatcgtaacatcgattttcgtacggccattcactggctcctcaatcgttttcatactcaaataagagaataccaaaatagagtttgcgtcagcctctaaggtatattttccatcaaaatcagtaatggtaccggttgtagtaccttttactaacacgttcactcctgttagtggttcatttagatccttgtcaatgacgacaccactaatcgttagtttctgtgcatatcctgtaacacacagaaaaaacgccaataataagataaatgactttctcatgaaaaatcgtttttgatttaagtgattctacatttgtgcttttttaattttcatactctttttagagagatcgggctctcttttctttcttttttagtgcataggcatttactcttttttgtttaaagttattattatattcatacaaaaatctctttctatttaaaatcaaacggttatattttaaataataataacaacgtagtatcattagaactaagtcgttttcatgttttgacagacaaatatatatataataactatacatacaagttaaaacgtaacaaaaatcagtatgttcctcactttttcaggtgtttgcgataacacatagtcaaattttcatcatgcctcaataaattaaatatgttaatttgatttagttctaatgaaactaacaacaaatttcaattaacataattttccttcattatcttcttcctcctataacatccaatcactatctgactatcatcttggaataaaattacagctctatttacaagcttcgaaaacaactcaatcaggaaattaaccattaactctaatttcttccacaaatattcaatgatttgcacagattatctctacatttgcgatatatatatatattaatgtattgactatgaactggacccagctattatccggcaagcgttttgggatggaagagtatcacgagcggaaacatgagagaactgatttccaacgagattatgaccgtttaattttctcatcccctttccgaagactacaaaacaagacacaggtattccccctgccgggaagtatctttgtgcataaccgacttacacatagtctggaagtatcctgcgtaggacgttcattgggtaataacgtagcgaaagggcttatccaaaaatatccggacggcagtatcaacttcccagagataggttccatcgtatcagccgcttgccttgcccatgatatgggaaaccctccattcgggcattccggagagagagcgatctccgcttacttctccgaagggaatgggcgaaaactagaagagaaagtacggaaggaacggggacgctgggaagacttcgtccattttgaaggtaacgcaaacgccatgcggttgctgacccatcagttcattggacgcaggaaagggggatttgccttaacatatagcacattagcctctatcatcaaatatccttacgcatccatctattcaggaaagaaagggaaattcggctttttccagtcggaggagggaagttatctgcaaatcgcccaagagctagggatcgggcataacccggaagccccggacaaatttcttcgttacccgttagtttacttagtagaggcggcagacgatatctgctatcaaattatggatatagaagatgcttgcaaactacatatcctgaccaccgaagaggccatacaactattattgggatttttcgaaggagagcggttggagcatatccgcaaggtcatgcatatggtagacgataccaatgagcaaatcgcctatcttcgttcttgtattatcgggctattagtggatgaatgttcccgtgtctttttagagaacgaggaaagcatcctcaatggtacctacagcactccgttaatcagtaacatatgcgatcaagccaagcaggcttacgctaattgctcggctacagcatacaagaaaatatataaggcaaaagaagtactcgacattgaattagccggttatcatattttcagccatctgatcgacagcttgaccgaggccgtgatgaaccaagagcatgcttacagcaaactgctcttacaacggataccggagcaatatgacacgaacgctcctactacatatggcaagatacaatgcgtactcgattatatctccggcatgaccgatgtatatgcgctcgatctataccgtaaaatcaccggtatgagcctgccggccgtttgatgttgtaataatgtgttagaattcttcccggtacttgctttccatgcgatcatccaagatgcttagatagcttttatagcgggactcgctgattagcccatcgttaacggcttgaatgacggcgcagcccggttcatgacggtgcgtgcagttattgaaacgacattcctccgagtatttaaacaactcccggaagtaatgggagatctcagcgtccgccatctcgatcgttccaaatcctttaatacccggagtatcgatcaaatagccgccgtcgggaagaggaatcatctcggaaaaggtagtcgtatgcattcctttgttatgatattcggagatatcaccggtacggagattcacccccggcaccagcttattgataatcgtggattttccgacacccgaatggccggacaaaagcgtaatcttatcttttagatccgctttcaaggcatccaaaccttcctcggtccgggcacatagcgtcgaacagggatagccaatcgaggtatacaactcgattaaattctccaacgccctttgatcctcattattataacgatcaatcttattgaaaactaatttaacggggacacgataagcctcggcggtcgccaagaagcgatcgataaatatcgttgttgttataggataattcaccgtaacgatcagcatcgcctgatccaaattcgcggcgataatatgcgattgcttcgataagttagaggcacggcggatgatataattcttacgttcctcgatctctgtaataaaagcggttccttctttattaatatcgattacgacacggtctcctaccgtgaccggattggtgctctttatgtctttcagacgaaagttccccttgatcttactctctatatctcgcccgtcttccgtacggaccgtataccaactacctgtgttttttattaccagtcccctcatgagaattgagaattgagaattgagaattgagaattggaataaggactcaatggggttccttaattctcaattcccaattttcaactttcaattatttaaacggtcattacttctttttctttagcggcgtaaagctcatcgatcttcttgataaacttatcatggattttctgaacctctgcctcggcgtctttctctacgtcctcgggaaccccatcagacttgatgcttttcttcaaggcctcgatagcgtcacgacgagcgttacgaacgctgatcttcgcgttctccgcctcctgcttacattgtttcaccaattgacggcgacgctcctcagtcaacggaggaatacctaagcggatcacctcaccgttattctccggcgtgatacctaactcagaatccagaatacctttctcaatatcgcggatgatcttcttctcccacggagtgatcatgatagtccgtgcgtccggaaccgtcaccgtagccacgttagtaagaggaacaggcgccccataatacattaccttcacacaatcgaggattttcggattagccttaccagcccgaatgtgagacaattgctcgtccagatactcaatggcgaacgtcatcttctcttcccctgctttgatcaattgtttcgtatctatcataaatatacgttttttgtttgcgaatcttttaattaacaaaagtaataaagatttccaacttcgcaaacatataattaaaatactccctaacaaaagatttataataccgtataaaagcttatcgccctcactgtttacttaacttaggcgtaaagaatagtaagtaggctacgcccacgcacaacaccagcactgctcctacttgagaagccaacatatcggatgccacgcccataaagatcgggaagatcgtgccgccaaacagtcccataatcatcaaaccggacacctcattctgcttattcggcatagaaagcagagcttgggcgaaaataatgggaaagacgttcgagtttccaaagccgatcaaggcgatacaagcatagatgatctctttcgaatgaaatagcagcaaaccgatcatcgccaataacatcaagaaaacactaaaggcgaagaatcctttcggagagacttttcgcaagataaaagccccggagaagcatcccgccgtacggaatatgaaatagaggctcgtggcgaagcctgcgtcggccaacgtcatgcccagacgttccatcaagatcttcggggcggtcgtattcgtccctacatcgatccccacatggcacatgataccgataaagcaaagcaggataaaaggcttgcccagcaaagccagacattcgccaaaggtggagggccgcccctcctctttggtctcgtggatagtggtagctcccaatagcaggatagcgatcacggcgatcaccatatagaccggaaacaagacacgccaaccgagttccatcgacggtatcgcttgggtagcaccccacatggcgatataaggcgccaagaaggaggcgatcgccttcacgaactgaccgaatgtcaaagaactagctagtttatccccgcttacgatattcgataataacgggttcaaggaagtctgcatcaaagcgttgccgatacccaacagggagaaggatatcaacatgaccatatatgcgtcgtcgaagatcgggatcattagcgaaagaaacgttacgatcaagctcaataacacggtcttcttccgcccgatacggttcatcaacatccccgtcgggacggagaagatcaagaaccagaagaacacgagcgacgggaagatattcgcctccgaatcactcaagcctaaatccgctttcaggtaattagaggcgattcccactaagtccacgaatcccatggcgaagaacgccaacatcacgggaatcaatttcaaggatgaagtcttctcgctcatggcttataaatctttagggtaagcaggccatgcgccactctgcgtacaaacataagcggctacttttaccgctttctcatgtgcctcacgtaaaggttttccggttaagatcgatgaaataaacgccccggagaaagaatcgccggcgcctaccgtatctaccacctgtaccttcggggtaggaatcgtagagacctcctcctcggaaaagatcgtactatactccgccccggccgtaagtaccaaatagcgcaaaccatatttcttcatgaaccagcgacacatatcctctatcgtgccttccagaccaaacatcgggcgaagcatttccaattcctcatcattgatcttgaatacgttcgccaattcgagcaacgattcgatcaattccttcgagtagaaatgctggcggatattgatatcgaagaagcgcaaggcatgactaggcatataagaaagtaaggtacgaagcgtctcacgagattccgcagcacgttgcgccaatgttccgaagcatacggcgtccgcacgtttcatcaggtcgatagacgcttgggtaagcgggatatgatcccatgccacaccttcgatgatcgtataggaagggatgccgttctttagctctaccatcacgcttccggtcggatattccaccgtactgatataattactatcgataccgttcttatccaattcctgaataatctcggttccgaacacgtcgttgcccacggcactgatcgcataaccttccgctcctaattgggtagcgtgatacacaaaattgatcggcgctccaccggctttcttcacgtccgggaagacatcccacaataattcaccaatgcctactactacaggtttactcttttccatgatatattttgtttttaattatttgaagggataaatggttaatgacgtaaccgtgaacgctcctcccttggcatgaaagctaatgcgattatacggttcttccgggaagactaggttggtcatgacaaactccccattcccgtcgaaagcctctatgctggatttatctaccagcaaacgcaaggtatattccttagcggcggagatcggggccgaggtagccgtggcgaatgtcttgctgaaatccgtgatcccgctgttacggcgatccatcgtgaacgtattatccagaagattataacgcatctccacctcctcgcctttcgagttaaacagctggaagctcatgatatcggccccgttgttcttaaacttgatctcgatctcataggttcccgtcggatcgggaagtaccggattgacctcatgggagcggtccaccttgaaggaacctttcttctgggctttccctctcaacttcaacacctcgggagacggggtgctgctcaagtacgtctgcccgtttttcgtataaagaaccaagtcgcgaggaaccgaattcgcactccggtattgcaaggtcggcacgttattcgcgtattcccaattgctcatccaagccaaggcgatcttccggtcctccggggcgttactccaagttaccgtagcgtaatgatccttgccgtaatccatccatttggtcaaggccggggattcattcacgaactgtttcccatcgaacgcacctacgaaatattgggtagcggagccgccaaacggaccaccggggttgatattacagatcaagacccacttcttcaattccgtgcccttcaccggaagctcgatcaagtccgggcattcccaaacgcccgcatgcgctccttgtccttccccgaaactgctctcatacgtccagtccttcaaattgggagaagaatagagttgcatctcctgccctacggcgagtaccatgatccatttattggattccttatgccagaagactttcgggtcacggaaatcacgttgcgtagaagtaaggatcggattccggtcatatttcttgaacgttcggccgttgtccaagctataggccatactctgcacttgccggtcgctggccgaggtatagaaagccacgatagcgccagcgccaaaccccgcggtattatccttatccaccacacagctaccgctgaagatcgtacccaaggcatccggggcgatcgccaccggttgatgctcccaatgaatcaagtccttgctgatcgcatgcccccagtgcatattcccccacatcgagccatacggattgtattgatagaacaaatgatactcaccatccttgtacaccatgccgttcggatcattcatccatccccaagccggcgagaaatgataggccggacggaatttctcccggttagacgaatcaaactgatcggatagcttcatctctttccagcaaagagccgattccggggcaagctggaagttgaaggagatatgcttatccgcataccccgagagatctaccggaacgaaataatccaccttattcaccgccaaacgaacattgaaagtccgtaccacgtcattatcgacaatcatatacaacttggattccggcgaggactcctcgaccggaagcaacaaatatttggctcgcgcatccacacggacaatgctttgcccttcgcccagatgctttatatctatagtacgttctgccgcatatccggccaacggatcgaccgcgctcaataaaatgataccgacagccatacataaactcttcagaagtctctttgtttgttgtttcataaacgaacggattaaaggataatattgtttgattctccgccaaaattaataggattcttccggatagaaaaacacttatcccttaaaggtgaggagatatgacatttgtgataaagatcgtacaaatgttattgatactcggtaggcgtaaccccgtagaccgccttgaagcatttggagaagtaagcgggtgaggagaaaccggttcggtaagcgacctcgctcaccgtgtacgcgttctgcctcaacaactgggtcgccttattcaagcgataggtacgcaagaactcgacgggtgcggttccggtaagctccttgatcttccggtgaaggtgcccccgggataatcccaaggtctcgcttagtttctccacattatattcggggtccgcgtaaacggcctcgatctgttccgcgaacttacgcagaaaggcgtcatcgatgctctccaccttctccggctcggacagaaggagcttattatcccgcaacttctccaacaaacgttcccgtaacttctggcgctcttgcaataagtggataatcttgatcttcacgtaatccgtatggaaaggcttctgtatataatcgtccgctccgccggtaatcccgaaaatccgttggcgctcatcggtcaaggcggtcaataagatcaccgggatatggctaaagggaagttgcgacttgatcatccggcaaagttcgaaaccattcatctccggcatcatcacatcgcttactaccaatgatatctcctcctcttccaatacccgcaaggcatctttcccgttcgcggccgtccgggtcttgaaatgagggctaagctcacgttccaaaaagcagcgaacctcatcgtcatcctcggtgataagtatcgtataaggataggttttggaaagcatcttatgggtttccgaatcgtccaaccgggaggcttcgtaggcttgatgggatacggacgtttccatcaggtcgctatcctcgaaatgcgcctttcctttccgcagacaaaccgtaaaggttgtcctttgtcccggctcgctctccacacggatctcccctccgtgcatatgtatatattcctttaccaaatgtaatccgatcccagttcccatcgaccgatcctccgtatagaaacggtcaaacaaatgcggaaggttaccgggttggataccacttcccgtatcgataacctgtataaaaacccgatcctcctcttctgtcagctctatccgcacgctacctccctccggcgtaaacttaaaggcgttcgagagaagattgacaaataccttctccaacaggtccggatcgatccatagcgtacattgttttatcgaagaagtgaacgtataggcgatcgcacgtaccgaggccatactgtcaaaataagatttgatctcgccaacgaaagggaccaaatcgatttcccgtaccgctagtttctcttgcttgccttccaccttccggaagtccaagatctgattgatcacacgcaacaaacggttggcgttcttctggatcaacccgagatccgaggcgtaaggagattcccgcaaggagattatcaggcgatccaaaggagcgagaatcaaggtcaagggcgtacgtacttcgtgagagacattcgtaaagaattggagtttctgcgccgtcacctctttcatctccgcgttcaaggagattagcttacgattcgcctgcctcatcttccggtttatgtaaaaggcgtaaatggaaagggcgataaaaccgatcatcaataaggagatcacccctaaagagtttcgcaggaaataaaaccggtcggacaaaccgtcgatgcgggaacgctgcgcctcgatacgttgcctatatttctggagttggtccgcttgcaacaataaggtgcgggcagactgatgatctaccggagccgtacgaagagggataaacttatccaccggctccccttgaatgatacgcatagccgtgcgaatcacttgctcccctcctgtcggatagaggaaagaggcattgatccgtccatcttccacggcttccagaccggcacccgccacggcatcaacgccgataatccgcaactcccgtcctcggatggaatcccatgccataaagtattcccgggcggctatggccatcatgtcgttatgggcgtaaacgaaatctatctgctcgggatgctctaacttccgaagctccatccgggcggtatcgaccagccattgtccttctatcttacggaaagaaagatcctccctttctcgcaaggcatcgacaaaacctttatgtcgctcttgcgccggggaggtttgcgtgagtccccatatctctaagataatagcgttcgggggaagataattggcggcgtaattgcctgccgctagtccgatctcataattgttcgccccgacaaaagaggtgtattgatcggtatttaccttgcgatctgtaatgatcgtcgggattccggcacggtacgcttcctcggcaactgccgtgatcggctcggattggtaaggggagatgatcaagacatccaccttttggcggatcaagtctcgtatttgttgtatttgtgtctcgttattgttttgcgcgtcctttataataatttccacgtcatcatagttggaggcttcgatacgcatatcgttaatcatggcttgccgccaagcatcgtccagcatacattgggagaggccgataacgtgcttcttctgtttccccgagcttgtgcagccacacaagacgatcaaggttaaccatactagtaaaaagggatgcttcatatacaagaataaaggtctaacgtatttgccacagggctggcacaaccttgccatgcctgtggcacgacagtaccaccagcatggcactgccgtgtcatcggttaatggcactaattatgcaccagtgtcccgatattctctccgctcatcactttcttcaagttgccgttggtatccatatcgaatacgatgatcgggaggttgttctctttacacatcgtggtagcggtcaagtccattaccttcaggccccgggtatagatctcatcatacgtaatatcggagaacttggtagccgtaggatctttctccggatcagcggtgtaaataccgtccacacgggtacctttcagcatgacatccgcctcgatctcgatacctctcaaggaagatccggtatccgtagtaaagaacggattacccgtaccgccggacatgatgaccacgttaccttgttccagcaactcgatcgcacgccatttattatagaactcgccgatcggttccatacggatagcggtcaaaaccttcgcattcacgccttgagcgaccaatgcggagctaagcgccaagctattgattaccgtcgccagcatacccatttggtctccttttacccgatcgaaacctttggaagcgccactcaatccacggaaaatattaccgccaccaatcacgataccgatctgtacgcccatctcggcgatctccttgatctgtgccgcatattcattcaagcggacctcatcgatcccatattgtttaccacccatcagcgactccccgcttaattttaataagatacgtttgtattgagccatgttttgtatatatttaatatgtaattccgcaaaagtaacgaataatccgatattcgcataaaaaagatcgccccaaccggtgtcggggcgatctaaacactaaccccgtgttttgtaagctgcgaggattagctaaaattatatgaaacgttactggttattttttatctaagatctccaaggtatcggcagcgatcatgaattcctcatccgtaggaacgacgatgatagtcaccttactgtccggagtgctgattaccatctcctcgccacgcatgccctcgttcttctctacatcgatcttcatgcccatgtattccatgttctcacaaaccgcacgacgggtcgcccattggttctcgccgacaccaccggtccaaaccaagatatcacaaccacccatagcggcggcataagcgcctatatatttcttgatgcggtagttatatacgttcaaggtcatgatcgcacgcggatttccggcagctacggcagcctcgatctcacgcatatcggaagagattccggaaagaccggcaacaccacttctcttattgatcaagtcggaaaggccggcaccatccatgccttccttatccatgatgaaagacaaagcacccgcatccacgtcgccgcaacgagtacccatcaacagaccctcaaccggagtcaagcccatggaagtatccacgctcttaccattcttgatagcggtgatagaaccaccgttacctacgtgagccgtgataatcttctgatcctcataaggaacacctaagatctcgcaagcacgacgggatacatatcgatgactggttccgtggaagccataacgacgtacgccatatttcttgtacatctcgtaaggcaaaccatacatatacgcataatccggcatggtctgatggaaagccgtatcaaacaccgctacttgaggaatacccgggatcaaagcctccatcgcccgaacacccttcaagttagccgggttatgaagcggagccaaatcagagcactcgattaccttattgattacatcctgattgatcaatacactggaagcgaactcctcgccaccatgtaccacgcgatggcccacggcatcaatctccttatagtccttgatgcagccataagtagcgtcggtcaacacgctcaggataaactcgatgccttcttgatggccggggatctctctctcgataaccaccttcttgccatccttgtccgtcaatttcaagaacgcgcccggcaaaccgattttctcgataccgccttgagccataacctcaccggaggtcatatcgaataacttatatttgatagaactactaccgcagttcaatactagaatcttcatattattaagtcgttaggattattatattattttgcggatttcaaaccgatggattgattacaagcgatcgctaccatcttataaatatcgtctacggagcaaccgcgagacaagtcgttcaccggagcagccataccttgaaggatcggaccgacagcctcagcgccacccaaacgttgaaccagcttataagcgatattacccacctccaaagtcgggaataccaaaacattcgctttaccggcgatctcgctacccggagctttcttgctacctacagcctcaaccaaagccgcatcggcctgcaactctccgtcgatcttcaaatccggagccatctccttagccaaacgagtagcctccactaccttatctaccatctcgtgagaagcgctacccttcgtagagaagctcaacatagccacacgaggctcaacgcctacgatattacgagccgtagcggcggtagcgacagcgatgctagccaactcttccgcgttcgggtttggcataaccgcacaatcggcaaataccaaaataccatcatccccatattgaggagtcttcgtgaacataaggaacgcaccggaaacacacttcatgcccggagccgtcttgataatttgcaaagcaggacgcaatacattacccgtcgtattctcagcaccggcgatctcaccgtcagcgtcacccgccttgatcatcaaacaagccaagaacaaaggatcttcaactagaaccgcagccttctcgggagtcatacccttcttttggcgaagttggaaaagcaagtctgcatacgcggctttcttctcgtgatttttcggatcgacaagagttgcctcaccgatgtggttcagtccgaaaccagccgccaactccttgatctcagcggggtttccaattaagataatgtctgctacaccgtcggccagtaattggtcggcagctttaagagttctttcctcggtaccttcgggaagaacaatacgctgcttgtcagctttagcgcgcgcaataatgtcttgcattaaatccatagcggaagatattttatattatttaataattgtactcgtaatccggctacaaaattaggcataatgcaatatagagtttacaaaataggcaaaagaattacaggtagagataccagtttcagatcttttaacagtaattcgtcacttcccgctccccggagagtatttgttgcagttcttccgctgtcacattcacacttaacttacctttatgggccacggagatctttcctctctcctccgagacaataataaccagcgcatctgtctccaatgacatccccaacccggaacgatggcgcaatcccatatccttgggaagggtagcgttctgggcgaccggcaagatacaaccggccgccttgatccggttatcggctatgatcatggcaccatcatgcaacgggctgttcttaaagaatatattctcgatcaagcgggcatttacatcggcgttgaacatctcgcccgtatgctcatagatagtcaagtccatatcttgctggatcacgatcaaggcacccgtctttttccgggccatattcatacaggccaagacaacaggggcgacaaacttcccttctttctccggatcgcctcctcgcttggaaaaaagtttccctaggaatttccagccccggtgcgaacctaacgccaacaggaaacggcggatctcgtcttggaagaggattaccaaaaccacgaaacctacgctaataaacttatccaagatggcccccatcaaccgcatctccaatacctgcgagatcaagatccatacgacgatgaatgatacgactccactgaatatagccaatgtgcccgagcttttcatcaacttataggtctggtacaggaagaaagccaccagcaatacgtcaatcaagtcttttataccgaaatgcatccacatagttaattgagaattgaaagttgaaaattgaaaattatttgttggtcatttgacctatgacgcgaatggcttccactgcttcccgcacatcatgtacacgaaggatattagcgccgttcaagagagcgtacgtattcaatacagtcgttccgttcaagctatccgcaggggttccacccagtaatttataaatcatgcttttacgggagactccaactaataaaggcaactcaaaaatagagaactcctttaaatggctcatcaattggtaattctgctccaacgtcttactaaagccaaagccgggatcgaggatgatatcattcacccctaaaagccgaagctggcgtaccttccgggaaaagtacagcatgatctcctccatcatatccgggtaatcagtatgcctctgcatagtttgaggggttccacgcatatgcatcatgatataaggcaccttcaaatccgctaccgtttggaacatatccgcatccaactcaccgccggagatatcgttaatgacagccactccatattcctctacgcaacgacgggcaatccccgcacgaaacgtatctacggacaccgggatatccgggtaatgcttatttaatatatgtaaggcaaactccaaacggcgcatctcttcctccggggtaacctcagcggcatccggacgggatgaataaccaccgatatcgatccaatcccctccctccgataagatttcccggatacggtcctcgatagcggtctcggtctgtttgcggctgcccgcataaaaagaatcaggggtaatattcaagattcccatcaccaacggtgtcgctaaagaagtaagtgtccctctaatattgagcattttatctaacatgatctttccttatttccagcaaagatacaggtttctctcttaaaatctccttctagattcttcattctttatttaattgctacatttgcgccgaattagacaggaataaatatttaacgcgatacagtcatgagtattatcgacctctatgatttatttatacataaccctcaaataacgacagatagccggaactgtccgaagggttctatcttcttcgccttaaaaggtgataaattcgacggaaatcaatatgccgggaaagccttggcatccggctgtgtctatgccgtcatagacaatcccgattattatataggcgaacgcacgatccttgttgataacgtgctgaagaccttgcaacaattagcgcaccatcaccgcaaggtactgggattgccgatcatcgggattaccggaacaaatggcaagaccacgaccaaagagttattggccgccgtgctctcaacgaaattcaatttactatataccgaagggaatttcaataaccatattggcgttcccttgaccttgctccgattgactcatgaccatgagatggcggttatcgagatgggcgccagccatccgggagacatcaaggaattagtggatatcgtccatcctaactatggcatcatcacgaacgtaggccgtgcccatctggaaggcttcggttctttcgagggtgtgatccggacaaaaggggagttatatgattatatccgtcgctccaaaggcaagatatttatcaagaaagagaacgagtaccttcagtctatcgccaaaggcatcgaacaaatcacatatggaaacggggatgatgctttcgcgtccggacaggtagtcagttgcgatcctttcttagtgttcaattggaagcaacaaggaaagttgcataccgtcgaaacacatataatcggtagttataacctagataatgtattggccgccgtcgccgtaggccgcttcttcaagatcccggcagagcgtatcagccgtgctatcgccgcttacgagcctaccaataaccgttctcagttcaagaaaaccgataataacgaattgattatcgatgcttacaacgcaaatccgagtagcatgaaagtagctctggacaatttcatcaccatgcccgtacagcctaaagctatcatccttggagatatgcgcgagcttggaccaactagcgacgaattacacgcggaggttgtcgcacagatcaagaaaggccagttcgacaaggtgttcctctgcggcgagcatttctccaaggtaggcaaagagttctcccccttcgctaccacggaggcaatggtggaagagcttcggaaacagccgttaaagggctatcatatcttgatcaaaggctctcatagcatggggctggagaaactagcggatatcctataagctatcatcgaacaagacggttttcaacttctggtacaagaaggagagaatcaataagataactcccaagattataaagacgaccaccttcccgatcgtaggcaagagccacagatccaccatcaccaactttagcaatacgatcgagaaggtggccaaactaatcatccggacaactttcagatgcaatcgcattcccaccgccatttgcataaaaccggcaagactcaacgagatagagaaacctgcgcttaattcatccggcaagcccaactgattcaacaaattattcgttcccacggccagtaatatcgtagacagcaaacaaatatataaggtcatcccatgcgtacgcttttctcttgcgtcgaatgccttataatagtaccgtcccaagacaaaaatatgccccccgattaaaagcaaggaaacccatagcaggaaccggggaataaagagatcatcatacccgacccacaaagacattcctccgaacagggataaagatagccccaagagtagtccatatccccccgcatttcttgacacaggcaaatagcttttccctaataaaacattcgcagcaaataaaaccgccaccgtaaatgtctcgatatagctaaaggacacgatcgaaggatctacatatgaatagaaatcgaaaacaaaggctatatataatacgacacatcccgtcaagagaggccctttcgtcgagatccttgtcggacgtaccaaccaagcgtctacccaatacgataaccccgtaaaaataccggtagcgaacaagccatttataaatagggaagaatctccgtaccgagccttcatacatccgtggaagacatccattccgtaagagcccagcgtcaagaccggaagtacccaaacgaatatctcgtaaacccgcagacggaaacgactatagaaccagagaataatcattacctctgaagcccaaaacaaggtaataaaggtcccttccagttggatcgggatcgtcaccgatacgaacgtaagagcgatacccaataacgtatgcatcaagaaagtgaaaggttcccctttccgtttgatccaaaagaaaagagcgaagttaatagccgcaacaaaaagggttaccagacctttgtaattctgctcaagctccatattctgcaggagacaaagggcaaagaacaggaatacgaaattgttcaatccgatcactcctaataaatattgattgatcccccggatattgattcgcacgatggaagcgaccgataataagaagatcaaatagaaggcgatagagaaaataagtaaatgcgttaattggacacttcccatcaaatccagatccgcagcatacgtataacccgcaaagacgatccaagtcaaggcaaaacaaattacaggcaattccccccacttcttatagatagatagcccgaacatccctaggtccaagatcatgacataagtaaacagcacccaataacttccatccccgctgcccactaagaatggagcgataaatccacccaccaaagcgataatcgccagttccctacgattatagagtatagataaagacgacataaacccggtaaacaatacaagcaagataaaagcgaccgtttggctgaacagcccgtaataatgataggcgatcgccaccgttacataaaagatcgcaaaagcgcctcccgccagcaaagagctaaaggtacgataggaatccttcaaacgccaagccacgaatagaagtaatccgcccatcccaaagccaaggatcgtacgcaaggtctcgtttatccattccttatctatcgcatacttcacgaaaagacccatacccaagacgagtatcaggataccgattttaccgaataaattctcaccgatatatttctcataattgacaggcttccgcaccttctggggttgaagatttctcgcaggttcgacaatcgcctttacaggttcaggttgtacgaaaacttccggctctttcaaggtctcaggctccggttcctttatctcgtccgcaacttccgaactattctccaaacgtctacgcaaggcagcgatctctttcgataattcctccgtcttctcctgtgatttggatatcttattacgcaagtttatccaaatcatgatcagtaatagaagtatcagtaaggtatattccataaactctaaaattataagcttgccgcaatatacgcatttatttatataaaagctttccgaaccataaaaaagtcccgacgatacgaatatcgccgggagcaattttttatccggtttccttcctcacggaaatactatcggaagaacttttttactttagtattaaccacacgttcccccatcacgggatactttgctgtgtggaaattatttaattaaatatatttagatagagacgggacgtgcccgcctctactgtatcatttcgaataaaataattatttaacaaccaccttaacagcagcctcaccctctacagctacagctacgataccggcaggtacagcgattgtagcgttatcagatgaaagaactgtctcagcaaccaccttacctaagatgttagagataacaacagacttgccagcggcaccttggattgttacagtaccatcgttagcgataacagagatagcagactcagcagcgatcttgtcattagatgtaggagtgctagttgtcattaccttgaatacttctgcttgctcaggatcagttgtccaataaacaacattgttcaaatgagccaaataagcattacgaggtaaatatttctctacatcatactcttcaccttgctcttcagctgcttcctcatcataagccggattcaaatattcttgaacagaaaggatcttgtaagcctcatcgctatactcagctgcgacctcaaatgcgacagcagccggattcaagttcatcgcattgattgtatcacccttgattgcgatagaatctataccgcatacagaaccagcgataaatgcagcacgaacagcctcagcgccagcagcctcataagcataacccttaacctctgcagaatccaatgtattcatcaaatagtttctagttttcacaccttcttccgcaaatgcattagtagaaagataatacaaaggcatagtctcttcgaaagtcaagcaagcagtatccaaccacaaagtcaaagaatcatgcgtatatacatcgctcttcaagatagactgtccttctgccttcaatacagcgaaaccatctttctggctagcgatcatcttgttatcatcctctgtataagaagtgatctgtacgtgaccgatattcaaagtagcatatgtaggagcatccttctttgcgaactcgaatgtagtattctcagtgttgcaccagctagctgtatatagcattccagatccagctaaagcagagattgcaaaaccataataaccatattcttcagtatattcagaataagaaaccaacttatattcattctctacaccagtagataagaaagataatgtaacaggataaacactattctctacatcaggctcacccattaaataataatcagttccattttcatttttagagcataaagtagccttacctaaacgatctgttacattatacttgtaaactttcactccatttgactcagctacagttgaatttgcctcatctaattcaacctcttctaccttaaatctataagcagaagccaactcaccggcagctacatacaatttgccatctttaacagttacatacaagttctccaataaatcagatttcaaacggaatgacaatgcaccattaaccaaatcttctttagaaactttcttataagctaactcttgagcatcctccactttcgggccttttaccaattgaactgtatctgttccaaaagaataaatagccttcgcatcatctattacgcggataatagcaccacctctagtactattagtattccacatattagccaaattattagtctcagtcaaataccataaagcagtaggaacttctgttacagcaccagcatgaactgtaccgttctcacagaaagagaatacatagtattttcctttgttcttatttgcggaatgatcctcatcagacttcgcattgttcatatccttaacaaagtaagtatactctggatccaatgtagtcggaagcttaacctcagcgaaagtacatttagcagcatccttagtccagattgtcaatttctctgtacctgcgaagttaccaaaagcgatcatctcaccattagcggcaacctccatgtcataacacatttttgacttcttctccgtatcatttgcgcctttatatacaggagtagcatacggataaaggatcatcttgctattatcggaaggatctaaaactaccttgaaagcatacaactctttcgcacgaccattctctaggatcgtaccatctgttacaccggtagccttatcagcagcagcagcctcatctttaggttgtgcgtctacagtaagtttccagaatttctcagaagacaaattagaagaccaagaagtagagtccacaactaaatacttaccggtagttctatcctgcaaagtaacataaccatctaaaccgtcaatgtctgtagcgaacaactctttgcctgccaaaggatttccatccagatttttgtcgaaagtcaaagcgaaaggagaaccatacttgttatttaacaagtcagcagtcatgtttatctttgctggagctgctactgtaaagttaatcgcagatgcagatacagccgttcccttttccaaagtaacaatatctgttctttcagcttccacatcatctttagcgatgatagaaacaactgtcttattatccaactgagcagataaagtaacggcagtcacattctccggagcgataaacgcactcccatttttgaagttccactcagcttgcttatccaatgtcaacactctacctgtagcgctattcgtcaatgtgtacgcccaagtattcgccaaagagacaaaacgataagttactttccataaggatttttgataatcagtgttcttgatatccgcagtaggagcatcagccaagatcaaactatcagtctttgtataagactctgtgacagacaaatatttaccatcctcattggtcaattggtaaactttgccattttcaaccttcgcattagcggtaaaggcagtacataaagccaaacccgctacaagagtagaaaactttttgttcataattctaaaattaatattaacctcaaatccgcaactacgcgcctaatatgatacagaagcgaaaagaatctgcatcgttagtaaaaagggggcacagtgcatcgaatgtcaccataaagacatataaatgccccttaccccaccatgcgacttgaggcaatacgcaaaatcacgactataagttgtcggtgttatccaaagtcattctggaacacattggcataagcattgttgcatgaatagatattcagcacatacttccttgatgtcctgacccatttggctggcacagagatgaacttaaagacaaacgtcttgatgcggcttgttgctttgagtccgaacctcttcacgtcaagcctcgccatgatgaatttatagaagttgcgtatgagtgccataagcagaagaaacaccgtgttttctcccataaaggattttggaagcctgttccagccgaatccgttattcatatcatcgaagatgcgttccttccctccacggaggttatagaattcgacaatctctttctcggaagactcgtagtcatttgtaaggatgcagcggtaggtgtattctccttcccacaggtcgagttcgccgtctatccgcttctgtctttgaatcacaagacggtatgccttccctttccatttctcgatgagaatggaggccagctcaaactcaatgccgcccaattccactttcttccaacctctgagggcaaagatgtcattgtagagcgaactgcatcggttagcacggatatagaaggtcttgcagtgtttagcaatctcttccactatctcttcagaacacgagccgcaatcagctctgaaacggttgataataagcttgttttgttcaaacctttcaaagaacctcttcagcgtgtccttctggtggaaacggacatttgtgttgccgtcgctgttctcaatgccgacaatcaagttgccaataaccgccacgccagggcgataaccaaggaacttcttgtatgtaggcttcgcatcaaacttctcagcctctatgaactggtggtcgaagtcaacgtcatacccctcgccctctttcagctgccctgtggacaataggcaattgaggagcagtgtattcagcttgtctgccgtgttgaagtcgtaggtcttgccagtgtcggatgtgtaggaaatgttatcctgggtcagttcctttatggctctaagaatcgtgtcggcactgcatgtgcgaagtgtcggatgaagcgaaaggtggtacatcagatgagtggtgacatcctcgatgcatgagccgccacaaaaataaacgctcataagcgaacggatgatttcgctgtattgataaccatacagcctgcatctcataccgagggttgagtcgattacagatgagagtctggagtcaaattgctccattattgaaaatattcctccaaaaggagtgagtttctcggatttaattgctacctttgccatgtctgtcgggtttgatacatattttgatttgcaacactaagataggtgaaaaatctgacatggcaaattcctgagcaactttttgttgctcaggtacttaaaaagttatatttgtaatagtgttgcggaattaaggattaatactagtgttaattaaaagctctttatatatgcatcccacctaaatgggtacaaaacgactagtctaaacgatcgtttaaactagtcgttttataaacctatcttcatacgatcaatagcatatactatattttcaatagaatttacccttttatcatatattatatatgtacgagcgtacatatataatataattatcaagcaatcaacaaatattccttattccttcaagtcttataataatgaaacttttgttcacctatgaagtaactttagttccataagcttaaaactatagcttgatgccgatgcaactaaagtcacaagggcaaaacgcctctttcatgcttttattggtcaaaaaagagagtaatctatgtatttgaaagcttttttcataaatttgtcgctttataataaactgagtaaaaaatgaatacacacgaactttgctgcgtaggacacatcaccttggataaggtagtaacacctaagaacaccgtccatatgccgggaggaacctccttttatttctcgcatgcgataaaacatttcgatgatatcgactatactctagtgacagccttggctgaatctgagatgaaaacggtggaggaactacgagctgaaggtatcgacgttgccgtgatgccaagtaagcacaccgtttatttcgagaatatttatggagagaaccaagataaccgtacgcaacgtgtattggcgaaagcagatcctttcaccgtggaatatctggagaacatcaactctaaaatcttccaccttggtagtttgcttgccgatgatttctctttggaagtggtaaagtatttagcggggaaaggcttagtatcgattgactcgcaagggtatctacgggaagtaagagacaaggatgtatttgccgtggattggccagagaaaaaagaagtacttaaatacgtgcacttcctcaaggctaacgaacatgagatggaggtgttaaccggatataccgatgccgtgaacgcaggaaaagttatctacgattggggcgtgaaagaggtattgctgactttcggaagcatgggatctatcatttacgacggttccactttccataaaatccccgcttacataccgaaagaagtagtaaacgctaccggagcgggtgatacttatatgacaggatatctctataaacgtgccaaaggcgcaagcatagaagaagccggacgtttcgcggcagctatgacaacattgaaaatcgaaggaataggcccattcaacggcactaaggaagatgtgttgcgatgcttagagacagcggaacaacgaatgcctgagtagttgaaaattgagaattgaaaattattcgctctctcctaattttcaattctcaattctctatctttaattattcttgaatgctttgcagaatgtagtcattagcaagatacaaagccctaacaagccgaccacgatataagcgtatttcatattgaaagcctgcgagatcgctccgatcaacaaaggtgcgatcaacgagccgataaagctgatactggaaaggatcgtcaaggcaattcccaccggagttctcgatttagcgcccactaagctataaatagtaggcaccatacacgagatgcccaagcctaccaacataaagcctaaggaattcacgatcacctttaccgtcatcgattcgaacattccacccaacatggctgagataaaaaaacctgctaaaataaagaaacccgctaattgcaacaccttctgctttcctaaaacactataggcggagttcgtaagaaaacggcctaccgtcatcatcaccatgaacaccaagaaaccaatctgtaaggacttaggaacctgcaataccgattcgaagtaaagtccactccaatcaaacatcgcgctttccaccaccaaggcaaacagcccgacgatacctaactggatcaacagcatttccggcttacggataaagctcaacaatgccggagcttctttcttctccgcttccttctcttcctccggtgactcaaccgccacgtcttcctgcaaatacttccggcttaccaaaacagtcactccaatcaataatgcaatcaacgtaaaatgccagaacggagtaacaccggatacgatcatgataaacccgatcaaagcccctaaacaagccgccagactccaacctccatgaaatgaggccataatcgtacgcccatagagtcgctcgataccaattccttgcgtattcaaggatatatcgcaaagattccagaacaccccaaaacagaacaaataaacacccagcagataaatattatgtgccgtacctatcgcgaataaggccaaggcataccccaacacactgacctgcgccataatacgactccccaacttcgacaccaaataacccgctaacggtatcgccacaaacttacctaccgggatcaggaacaagaccaagccccaatagaaagcgtaattcacctcaaaaatatccttcacgtccggaatacggctagcccaactagagaaacaaagaccttgcgctaaaaagaaagaaagcatcgcataacgaatccgttccttgggaaaagcgttgcccaatgtagcattcattttttcattcattatcatttacttttattgttatcatttattcgagaaaggggcacgccccccatttcttcgcaaagctatcaaatatatcctaatatcctaatcccctaagtcttaaatgtagaatttaagagatggcttccctaatgaaaaatatattttacactttggctgaaacacttaattataacttaaaccttcgctcaattgaacaatttgacgatattctccagcaacccatacgttgtcgttttccttgaatacggtttgggatggaggattcatcattgactttccgtctcgttcaatacccaagatcagacaagcgttcttatcccgaatgtcagactgttgaatagatcgcccgatcaacggagagtctggttcaatattaaattgctctattttgatattattattaaagctttgcgccaactgatctctatattctttgtcctgtttttgtattatctcctggaaaagatccaattcctcatccgtaccaacaattataatcttatcaaaaggataaaggcgttcctctcctctaggtatattgatttgtcgttcacctcgaatgatggaaacgatatttattccatatttttgacggaagttgatctctttcaaactccggccgacaatggaggattcttggccaacaacgaaatccatcaagtgcaaatcattgaaaggcaaagatttcaagatattatcagtcaaaggacttccaatgtttgagtccgttgttttcccgttgaagttgtcaataaatcttttctcgatcgagagagaacgctttttcagttttttggataaaataatcattagcaatatcaacagggtgataataaatccaacaccagatgctacattaaatatatggactatgactggcattagaatacttgcgcaaaggagcagctttatcgctatcaaagaaaccaatggtccccggttgaatttactatcattccataatttcaggaattcaggagaatgattcttcttcataatgatagcccaaagaaaaggtaatataatggccaaaataatagataagctcaatagagcccctttgaagcctaatatgttctcgcgaataattggatttacataagtgaaaaatatgataatactgaatattgtcaatactgtatatagtattacatctagtaacatagatttcaacagcttattccatgtacttttatgtttgaccgtgttggatccggaagaataacggttcaacattagttttatagatgaaggcaaataattgtcaatcaattgatagaccggggtcgccatgcgaatcatataaggagtaagaaatgttgtaacgactgatacagcgacaataacaggatacagataatcgtctgttacctttaagctaactcccaatgaagcgataataaacgcaaattcacctatttgggtcagagagaatcctgattgtagagctatctttaatggctgtccggacaagaggacaccaagactcccaaaaaagatttgcccaatgataaccaatatggttaagatgcagattgggacaaggtattcaatcaataaatccggttgtatcatcatgcctacagaaacaaaaaatatggccgcaaacaggtcttttaccggttttaccaatttttctatcttctcggcctcaatggtttcagccaataacgatcccataacaaaagctcctaacgcagaggagaatcccgctttagccgcaatcataaccatacctaaacagaagcctaatgctatgattaataaggtttcgtcgttaagaaatggcttaatctttttaagaaaacttggaatcagatagattccgagtaatgaccaaaatataagaaacgctcctaactttagaatactttccagcatttccattccttcgacttgcttgctgactgctaaggttgaaagcaagaccatcaaaactacggccactaaatcttcgaccaccaagacgcctaatactactcctgtaaatttttgccctctgagtcccatgtcatcgaacgccttgaatacgatagcggtggatgacatagaaagcataccgcctaaaaatatactgcttagatgcgagaagccaagcgcgtttcctgcagtatagcctagaaacatcattccggagactatggttatagaggcgataacagctgtacctcctacggtcatcaacttcttgaaagagaattctaatcccatagcaaacaaaagaaagatgacgcctatatctgcccatatttttatattggtaggatcggataccgttggtatataaggtacggcgggcccggcaagaatgccagcgacaatataccccaaaacgacaggttgtttcaagcatttaaaaatcaatgtaattattcccgccgcaatcaatataaccgccaagtcggaaataagaggtgcaatttcagacatgttattcattattttgtgctcgcaaatttacatattaacttagaaccatgttgggataaaacaaaagtactcttgtcctaaaaacatatatgggaaatattccaggacaaccgcagcaaattcctcctccccccaagagctttatcttaacagcatgaatacaccaatatctataagcggcagtttacgagatataaaaaaagggtcttcattgctgaataccctttcttggtgatccgcctggggctcgaacccaggaccccaacattaaaagtgttgtgctctaccagctgagctagcgaatcatcctatgcgttacttctgtaatgcgggtgcaaaggtagggatatttttttaatacgcaatagatatggctatttttttgcgattaaatctgaatttatttcctcttgtttaggttgatgagcaaggcttctggaatctaactcattatattcatgcaagataaatcgtttataataagataagcataaggttgttaatgggagggctattattaagccgataaagcctaagatcgttccccagatggataatgagagtaaaatgatggcgggattcaatcccatagccttacccattatgcggggggtaagatataaatcctgtatacattgtacgatacccaagactaaaatagccaaaccaaagatcaaccagaagttctcgcctgtctcggccgaacgcaataagctcaatagaatcatcgggatgataccgatcgcctgcatatagggaattaagttcagcacgccgataaacaagcccagcgtgaccgccaacgggaaattaatgatcttaaaaccgatcgcgaggagaatcccgacggagagagcgatcagcgattgtcctcggaaataacggttcatgctgtattccacatcctcagccaaaccttgcaggaacggacggtaacgctccggtatcaaatcgatccaaccattcgcgatcttctcatagtccaaaaggatgaagataaaataaagcaagatcacgaacacgatcgtgatactgaaaaggatcgagaaggtgttcgataagatagaccataactggggtgctatctgcttcaccgctttcaacaaattctccttactcaataactccataatctgagcgaagttcacattactttccagatattccatccatgaatgcggaatcaaagggacatgaccttcaccgggatcatgtgtgcggatcagttctagcgttttatccgcctcagccgcgatggaaggaacgaccatgactatcagcaacgttatcaacagccctaaagtcaccaataccgccataatcgataagatacggctcttaaagcataatttatattggaagaactttacgaacggttgcatcatgtaagccagcaaccaagcgatcaggaaaggtaacaatgcgttccgtaataaggctatcaaatagataatccctgagatgaccagtataccgaacactatgcgtattacacggtcaaacgtaaaaggcttgtcaaacagtggattcatattattttcatatctttgcttgcgacaaagatagaataaagtagaatatataaacatcatgatacgtaaaatatcctttttcttcctcatttcttgcttatacctttcagtaggggcacaggttccacaacctatcaagcaattcctgcgtaagccttatatggaaggagcctcattttccttgatcgtgaaagacgttcacaatggcgagacggtattcgcttacgataccctccggcagctgaccccagcctcggccatgaagacggttacgaccgctaccgccttggagatactgggcgaggattatcgctttcccacgacattggcatacgatggctccatcgagaagggcttgctaaaagggaatctatacatcaagggaagcggagatcccagccttggctcagcgcatttcgccccgtatcataagcggttcctacaggaatggatctccgccttgaaaaaggtgggtatccataaaatacaaggtgccgtaatcgctgatgaaagtatattcgacacggaaggcacttcctttaaatgggttggcgaagatatgggcagctattatggcgccggaagctatggactttgcgtattcgacaatctctataaattaggactgcaaaccggggctcccggaagccgcccgaagttgaaaggaaccgaaccggaattatccggcatccatttccataattacttaacggctcagcaagtatcttcggatagttcttttatcgtaggggcgccattcgccacggaccgttatttatacggaattgtccccgctaaccgggaatggtatccgctcaaaggggatatcccggacccggctcttttcctagcggattatctcactaggcaattggaacatgaagggatcacggtcggcgaatcaccgtcttgtttccgtatcttgcgggaggccggtaggtggcaacccgggaaacggaccgagattgttaccacttactcccctacgcttcgggaaatcgtggaagtgaccaaccatgtcagccataatttattcgccgatgccttgatcaagacaatcggcctacgctatacgccccgtaagggagaggtcatatcttcttttaaccggggcatccaggtgcttcgggactattggcaagggaaaggactcgacctctcgtgcgtctggatgtacgacggtagtggccttgcggttaccaacaagttatcaacagcttttgtggctgatttattgatttatatgagaacccgttcacaacaacacacagccttctacgaatcattgcccgtagcgggggtagaaggctcggtgaggaacttcttaaaaggctcatccctccaaggaaaagctcatcttaaaagcggaagcatgagccgggtaaaaggatatgcgggatatataaacaaaggcgataagcaatacgccatcgccctattcgtaaacaactattcctgcgacggacgtcctatgaccgtagcgatagagaaattattgctccagttgttcaactaaccagcggttatttaggcaggatcgatctacgctctatcatctctaggaaatgctgtttataattgtcggagatcgggatatactcctttccaaagacaatccgattacgctcgatcaccttgatcttctccggctggacgataaaagagcgatgaacacgcacaaagcgatccgaaggtaacatatcctccaaactcttcatgctcatcaacgaaaggaccggacggggctcatcctccacgaatatcttcacgtaatcctttaatccttcaatatataatatcttgcgcagctctatttgcaacagcttatactcactcttgacgaaaatactctccatcccgcccttctccgcaattggcgcggatccttccttctcttccgaagacaccggcttacggagcagctcataccatcgcaacgccttattcgccgaggcaaggaagtccggataactaattggcttcaacaaataatccagcgcgtttactcggtaactatccacggcatattgatcgaaagccgtcgtaaaaatgacacgggtatcggcgttcaagatacgggagaactccaatccgctcaactccggcatctggatatccagaaaaagcagatccaccggccgatcccgtaagtcggaaagagcgtccaaggcactattataagtcccttgtaaatccagaaacggagttttcaagacgtagctttccagcaagctaaccgctaaaggttcatcgtcaataatagcgcaagtcaatctcatatctcagtctcgtttatagtaattgatagataagaagaatagttatccccctcccgaccgcattggaacgagaaatgccccggatagagcagccccaagcgtttctccagattcaccagcccgataccggaaccacttttatcttgatccgggcttttcgggaaatagctattcacgatagtacaaactacctccgccccctcctgatggatatccaaatggatgaaagacggcttattattgctcaccccatgcttaaatgcgttctcaaccaaggagataaacaacaggggggcgatcaaggttcccggagaggaagcgacgatattcgttttcagctccacatgtttgggcaggcgtatacgcatcaactccacataattacgaaggaagtcgaaatccttctccaaagggacaaaaggctggctactctcatacaagacatagcgaagcaagcggctcaaatcgtgcaccgcctcctgcgccttctccgggctgaacgctatcaagctatagatattattcaacgtattaaacaggaaatgcgggttaagctggcttttcaagttctgcaattccgcctcggcacgctccttctccagttcccgctggatagccgccacccggtaccatccgtccgtcatcttgatcgccacgctaaggccggctaccaaggagtagataacggcgttgacgagaaagaaccccaccgtctcgttcaacgggcggggcggacgagccggatgatgcatctccggagggtagaaatagcgcatgcagaaatgcacgaacagcatcgtactcccgataagcaataggttaatcagcaggaaacgccctgtccggcggttgaacaaataccgcctcaccagccacccgtaattcaagtagaagacgagcatgaaggagagcggcacgatgatgctccgcagatacccctcgaacgtgacttgcgactccctccccgtgaagaagaagggggaacagaataggataccccatcccgcaatgtgtatcaactttcccaaacctttgatagggggggattgtggtgtgtcattcatcttattatcctctttagtgctacgcaaatatagtcattcctaccgttatatgagccatgtagccttatctagtgagccttcgcctcatagctatgaggtgtcatacatcataggtttaatgcatcgttcctcatacgtatgatgcataccctttacaggtaaggagaccatgcctcatccgtctactcatagcgtatggcctctatcgggtcgagctgggccgccttcttagcgggataccatccgaagaacaccccggtgacggtacataccacgaaagagagcagtacgctccatggctggatatagatcgggaaatgcgccacgacattcacgatcaaggcggctcccacgccgaaaagcacgccgatcaatcccccggtcacgctgataaggatagactcgatcaagaactgagccaagatatccatgcctttcgcaccgatactcatacggaggccgatctcccgcgtacgctccgtcacgctcacgtacatgatattcatgataccgataccaccaacgagaagagagataccagccaccgcggccagcaacgtcgtcattatatccgtcgtacttgtcaacatcgtactcaactcctgcatactccggatcgtgaaatcatcatcatcggtttcccgcagcctatggttacgcctcagtatctccgatatctcgtctatggcttgatcggtgtactcctccttgagcgccgagcaggttatgccttgcaaatgggtaatggccaagatcttcttttgaatagttgtgtatggagctaagatcaggtcgtcttggtccattcccatgctgttatatcctttgcttttcagtacgcccacgacccggaacggtagcttctggaaacggatcacccgtccgacgggattctctccgccggggaaaaggttatccaccaccgtcttcccgatcacgcataccttggcggcggtctgtacgtcttgatcgctgaacatatcgccatcctccacctcgtatcggcgtatctccatataatccgggctgataccgtagacggtggtcggggcattgttggcgccatagatggcctgcccgctactgttcacggagggagaggtggcggagacgtagcgagtctcgttcacgatatcctcgtagtcctgtagcttcagcgtctccatggcagaggcgtcttggcggacaccaccacgcatgtcggctcccggctggatcatgatcatgttcgagcccatctcgctgatctgcgcctgtatactccgcttcgaaccttgaccgatggccagcatcgtgatcacggaagccacgccgatgatgatacccagcatcgtgaggaatccccgcagcttgttgttggccaaggcccggagggctatctttagtaaattcgtcgtattcattgttacttctgtttatcgcttaatcatcattcttgggcaggcgggccaaagcctcggcggcgctcaagatattcgtattcaccgtatcggcggttacatgaccgtcgcgcaacgtgatattccggctgctgtattgggcgatctccgggttgtgggtgacaaaaataatcgtacgtccctcggcgtgcagacgctggaagagcaccaagatctcaaaagaggtacgggtatccaagttgccggtagcctcgtccgccaggatcaccgccgggtcgttcaccaaggcacgggcgatcgccacacgctgcatctggccaccggacatctggttgcttttatgcatcagtcggtctcccaagcccacggcgatcaaggcgttgaccgccttttccctacgctgagccgctttataggcggggttgtacatgagagggagctctacattctctaccgccgttgtcttcgccagcaggttatagctctggaagacgaagccgatcttacgattccggagagtcgcccgttgccgcttgttcatggtgcgcacggataccccgtctaagtaatactccccgctcgtaggagtatcaaggcaacccagcgtgttcagcaacgtactctttccggagccggaggttcccatgatcgtcacgaactccccctcgcggatcgtgaacgacacgcctcgcagggcatggacgatctcgtcgcccacgtggaagtctcgttttatattgtctaatctgataatttctttcatgacgcaaactatctcttatttttgttgcttcccggagggcccggcatgaaagggctacgctccgctcctgcacctacttccggcatgttagcggcgctcgctaaatctacggctacctcatcgccctcgctcaagccctcggttacttcggtcacgctgttgttgctggttccgaccgtaatctgcctcgggctcaaggtatttccttggcgggaccaaaccaagcgttttccgggttgtacctccgcattcggatctgtcacggtcatacccaacgattccatgatggcgggctcggggataaaacgaagtgccttgttcggcaaggtcaggacattcgcacgttccaacgtataaatcgtgatattcgccgtcaagcgaggtttcagtttcaagtccggattatctgccgtaatcactacctcgtaggtaacgaccgtagaagaagaagtactggaagaagcgctggaggtgctttcgctatccccaaggcgaatctggcgaaccacgccctcgaattgatcgttcgggtaggcatccaccgtaaagctaacccgttggccttcctccacgttccctatatccgcctcatccacgtctgctatcacctgcatcttcgtcaagtcggcggcaatggtaaacagagtcggggtctcgaagccggcggcaacggtctgcccttcctcaacggcccggttgataaccactccgtctatagggctcgtgatcgtggcatattccagattacggtttactttcaccatggaggcctgactctggtcgtaagcggccttcgccttctcataattataggtagccgtctcataatccgtatcgctaatcaattgtttctcgtgaagcaccttgctacgtgcgtagttcttctgttgatactcgaactccgtcttgctgctcgccaattgcgcctcggcggaacgaagttcggcttggaggttgatcttatccatctcggcgatcagttggccggccttcaccacgtcgttataatcagcgtacaacttatcgatgataccggatacctgcgtacctacctcaacctcggtaacgggctctaccgtaccggtggccgtaaccgtattcgtgatcgtgctgcgccctaccttagcggtctccagcttgatcccgcctttcgaggatttgcccgtgaaaaggaacacgccccccgcgatgaggataacggcaacaccgcccatgattagtttcttcttgtccatattctgattcgttttatttctgttttacgttctgttcttgttcaaaaggcccccgcgacctccgtcgcagggtaaccttgaaaaaagagagtggagtaaatatatatatatccattagtgggttaataattctccgcaaccggcttcttctgataaacattcagcaactggacgctcatcaaggccatgtatttcgcttgtagctgctcttgctgggcggtcagataattgttcttctccgtcaatagctcaagcgtatttttcataccgaggctgaattgctcatcgatcaagttatagctttccttcacgtaactcaagcgttcggtagccgaggtatattgggtctgcgacgaggtagcgtccagatagatcccctccacggtttgcagcaattgtttttgggtattcagcaactccaactggctggtggtaatcgcgtatttcgccttgttataggccgtcttatactgacggttactgaagatagggatgctgatcgtcaatccgacactctcgttgaagctattccagatctggctaccgaaagcgtaatccgttccggagagatggccggtacccagcccggcgttcatggagagcgaagggaggaaagcgcctttcgcctttttcttctccagctcggcgatgtccacggccagctcactgctctttatttgcggcatcacggccagagaggtattgtaaatcgtttgcttgctcggaagcggggttaagatatctttctccgtaagctccggcatcaccaattcgatctcttcggttatatccagttctagtaattgcttcaattgcaacttataattgtctagattcgtctgggctacgaccaattgatatttatcggtgcttaactggctttccaactgggccaaatccactttcgaaatcgaaccggcacgtagcaactccaccgcacgatcccgctgcgccgtagatacctcgaccgtattttggttgatacgaacggactccatcgcatatagtacctgcatataggtctgtatcaaggagatttggatatcatcctcgttttgctcgatacctagctcatcgacggtattttgtatttcctgttgcttgatcgtctgtacacgttgccctccatcaaaaagcgtccatttagcgttcagcgcataattaccgctatagctattattcgtagcggcgtcgctcgaaggataattcacgaatccttgggtaaccgaagccgaaagggaagggaaaagctgtgctttcgcctgcttcgtatcctctataccggaaagatgcgacaccttgcttttctttacttggatattatgctccaaagcgtaatccaagcaagtgcgcaacgtccatcgggtaggttgctcttgtgccttactccctacacagaggaagaacagacatgcgaataataaagcgtattgtttcatattgccttcgttttctatctttttacgaaagcaaaactatattaccttaaaaacatgggcaaccagactagaaaaaggggctgttttcaccgattaaacgggcaattccatcgacatcgggattaccaatataaaataatacccgcgatacccgccaagatgatcatcaagataggatgtaccttgaatttccatgttaggatgaaagcggcaccaaagatcaagaagctcttgtagtcgatgaagttctctttattcattaatagcaaggcagcggcagcgatcagtcccaccgtagccgggcgtaatccaaggaaagccgcctctacatatttattattccgaaacttagcgaagaaataagagatcagaaggaccaataagaaagaaggcagacataccgcaaatgtcgtcaggcaagatcctaggatactcatcgtctccgaataccccgcattatgcaccgccgtataccctatataggtggcgctattgataccgatcggtccgggtgtcatttgagagatagcgacaatatcggtaaactcctgcaaggaaatccaaccatagcggtccaccacgtcggcttgtatcaaggataacatcgcatacccaccaccaaagcccaatataccgatcttcagatatacatataataattgtaaccaaatcatatcagcccttcttatttaaaccatacaccaaacctccggctatagccgccaagataatccaagcgggagacaccccacccatccagatcagcaatgccgccccgacaggtatgatcatttgcacgtaactcaacttgatagaacgtgcggttgtcagacaaggcacggcgatcaaggcgaccaccgccggacgcaatcccataaacgccttctccacccatacattatcctttacctgcgtaaagaataacgcgatcaagagcatgattacaaaagaagggagaatcgtgcccaaggcacaaacaaaaccgccccatgtcttcttcagtttataacccacgaagatcgctatattcacggcgaaaatacccggcaacgattgggccacggagaaaacgtcgataaagtcctctttcgtcatccacccccggtctaccacatcccgctggataagcggcaacatggcgtaaccacctccgatggtaaacataccgattttcacgaatgtcagaaaaagcgtccaatacatacccttatcagtttacgttggctaacgtcctaaaagcctattgtaagtttctttattattaataatctgaagcgctttctggtaactcggattatcatcattgataatctggaagtactgcgccatatcatagagatcccgtgcgataagcgccttgatctgaagcatgatcaacggcttcgaacgattatattcttcttcctcaaactcaatcttctcatcgccggccatcttcagaagctcctccatgatatcctctccgaccacgaaatcttgcttatattgctggaacttcggatatttagccatcatctggttccgattacgatccagataattcatggacacccgattgactaaaccggaagctaccagtttccggtgataatccgtatagcgagtcgtatctaccgggatgaacacgtccggcataatacctccacctccatatacggtacgctcggtaaccaaggtgttatacttcattgaatcggggaaatgaatgctatcggcactcatcaactccccccggttataacggtcgatcagatcatggtggtactcctcgatcttcccgttctcgtaaggcttttgtatacaacgtccggtgggtgtatagtaacgggaaaccgtcaaacgaatcatggaaccatccggcaggggaatcggtttctgtaccaaacctttaccaaaggtacggcgacctacgatcacgccccggtcccaatcttgaatagcgccggagacgatctcgctggccgaagccgaggactcgtccaccagcacgaccaaacgtccctcttggaattgtccgcgagcggtagagttcgcctcctcacgaggttgcttactccctttcgtataaacgatcaaccggtttttatccaagaactcatccgccagctctatggcgatattcaaatatcccccgccatttccctgcaaatccagaatcaagttcttcatgccctgtttccggagcttctccaacgcctccctgaattcatcggcggaagaagcggcgaaacggttcaacttaatataaccggtattcttatccgccatataagcggcatccagactatacacgggaatcttaccgcgaacgatcttgaaatccatcaattccggcgacttgcctcgctttactttcacacgcacctcggtacctttcggtccgcgtagtttcttcatgatatcggtagtcttcatcttcacgccggcgatcaaggtatcgtctacttggataatacggtcgcccgccatcaaccccaccttctcagagggacctccggggattacctgaatcacgtaaagcgtatccgtcaacatattgaactgtatgccgataccatcgaaattgccttgtaaaggctcggtcatctctttcgtctcctccggatccatataattggaatgagggtctagcttatccaacataccgactatagcgtcttccaccaacttcgtctcgctagtagagtcgacatatagattagagatggcgaataaagccaattggagcttccgggcatccatattcgctttttgcgctgtcgctccggtaaacacacctagaacgatcagcagggataagacgattcttttcatcagatatattcgtttcataattttcaatacaatctcgtctctttagggacgaattgggaaatgtctttgccgtagcgtaacaactcacggacaatacttgagctaatatgcgtatgctccggttccgtaaacaagataaaagtctcgatacccgtcaacttacgattcacgtccgcgatcgtcttctcatattcgaaatcattgaccgtacggattcctcttaagataaagccggctccaacctctttagcgaaatccaccgtcaattgattatatgacatgactttcacccttggattatccttgtatagattccagatcgcttccatccgcttctccaaggagaaataggtaagcttcttatcgttgataccgatcgagatcacgatctcgtccaccagttccaacccacgccttaccaaggattgatgcccgatcgtaaaaggatcgaaggtaccgggaaaaagcgcaatacgtttattttcaattgatgacatcttcttcaaccactaagttatcgataataaagttctgtcgctccatggtattcttccccatatagaactcgagcatatctttcacgaggtcctctttcttcattgtcaccggatcaaggcgtatatccttgccgataaaatgcttgaactcatcgggagagatctctcccagacctttgaatcgggtgatctccggattcttcccggcagcggctatggcagccaagcgttcctcctctgaataacaataccacgtcttctgccggttacgtacccggaataacggggtttgcaagatataaacatgattacgcttaatcaaatcggggaagaattgcaagaagaaggtaatcaacaataaacggatatgcatcccgtccacatcggcatctgtcgcgataatcaccttattataccgcaaaccttccaagccatcctcaatattcaaggccgcttgaagcaagttaaactcctcgttctcgtaaacgatcttctttgtcaagccataactattcaaaggcttacccctcaaactaaatacagcttggtaattcgggttacggctcttcgtgatagaaccgctagccgagtcaccctccgtgataaagatactgctttcctctagcaaatcccctttcgagtcggtcaggtgaatccggcaatcccttagtttcttattatgtaaattcgctttcttcgcacgctcgcgggccagcttcgtaacaccggcgatcgccttgcgctctttctcggactccaagatcttcttcagcaaaagctccgaagtctccatattcttatgcaaatagttatccaggtcattcttgatgaaatcaccgataaacttcgctaccgtagggccgtccggtcctatatctttcgaaccgagcttggtctttgtctggctctcgaatacaggctcctccacttttatgctgatagcggccacgatacccgcacgaatatccgaatactcgaaattcttattgtaatattccttgatgacacggcctatagactccttgaaagcagaaaggtgcgtaccgccttgggtggtatgctggccgttcacgaacgaataatattcctctccatattggttgctatgcgtgataaccacctctatatcctcccctttcaggtggatgatcgggtaaagaggctcggtggtcatattctcgttcaacaaatccaccagaccgttgcgggaatagaaacgcttgccgttgtaaataatggaaagtcccgagttcaagaagacatagttctttaatagcccctcgataaactcgtccttataatgataatccttaaagatctcccgatccgggacaaaaaacacctgcgtaccgttcgcctccccggtcggttggatatccgattcctccgtgacgatcgccttactatattccacccgcttacactctccgtcacggtagctggttatcaagaaataactactcaaggcattcaccgccttgatacccacaccattcaaacccacggatttcttaaacgccttgctatcgtatttagcgccggtattcatcttgctagacacatccacgaccttacccagagggacaccacggccataatcccgcacggctaccgtaccttcctcgatagtcacctcgatacttttgccataccccatcatgtactcgtcgatagagttatccagcacctccttcaacaacacatagataccatcatcggcatagctaccgtcccccagttttccgatatacataccgggacgccggcggatatgctccatccagtccagtgtcttgatgtcatcatcgttatattccgtaggttgttgtatcgttgaattcagctcatccatatctcttataactttttaatatacgctcttcttgatttatgatgctctcgcttgaaataatcccattgcgcttgtacggcgctattcgtctccagctccgggttactctcggcgtaaacggcaccgatacgcttatagaccggaatcaagtcattaaataataaagcgttcacgcctttactttgatattccggcaaaactcctgtcaaatacaggtcgattactttcggtttgctcttcaacgctttcagcaaatgaatccacccgaagggtaacatatgcccacgagccttttgtaaggctctcgataggttgggcagggagatgccaaagccaaccaccgcattatcctcttcccttacgatcagcgttaccaaatcataacgcagcatagggatatacatattgatataataatcgatctgcttctcggtcaattgcgcgaaaccatacaagggagcgaaagccgcattcaatgtatggaataccggacgggcgtaaggcataatctccttagcgttcttgaacttcagcaccttcaatccgtatttcttcttcacgatctcaccgatacgcaagtgcttctcaggaacgccatccggtatatagatcttaaattcatgccaatcttgatcctttccgtatccgatacgctccacttgcttggggtaatagggataattataaattgtagccatcgtaccgatctgatcgaaaccctcgatcaacataccctcgtgatccatatcggtaaagcccatcggaccgtggatctcctccatgccttgttcgcgggcccatttctcgacagcgccaaaaagggcatcaaccacctcgtcatcatcaataaaatcaacgaaaccaaagcgggcacgtttctgtccccaagcctcgttactcgggcgattcaccataccggcgatacggcctaccaccttcccgtccttataggcaaggaagtaaatagcgtcgcacacctcgaacgccggatttttcttcttatccagcgtcatcatctcttcctctattaaacccggtacgtgatagggattacccttgtataattcgatattgaacttgacaaacttcttaagctccttcttactggtaacttctcttatctctacgctcatcggtaattttatttaagcggcaaagttacataaataatcttttatcatggcattataaaacaaatttatacctttgtaaactcagattcatagcataccatgaaaaaaatagttattaaattaatattggcatttatcatgtttgaaggaacctcttgtataaacgatcctattataatcagccccgatctggcgtttcgggcggaagctactacaggggagggatcgatttggcatcccgatcgcaatacacttttctgggtagatattgaaggaaagacgttatatgagtatataccggacttgcaaaattgccgttcatggcagttcgaccgcatggtctctaccgtagtaccggaaacggacagtacggtagtcgtcgctttacaaaacgagatcatacgtgtaaacctaacggatgggaacacgacatctatcgccccaatcccggacaataacgggaagattcgttgcaacgatgggaaatgcgacccgtccggacgcttatggatcggcaccatgggatttggagcgcctaaaggggctgccagcctttattgtgtatgggcagacggaaccgtcgaaacaaagttgacaaaagtcacgatctccaatgggatcgtatggtccgccaacaagaaatacatgtattacaacgacacacctacccgtaagatcatacgtttccggtatgacgatagctccggtgacatattgtacgatggcgtagccgtaaatatacccgagggcaccggctccccggatggaatgacgatagattgcaacgacaacctttgggtggctcaatggggaggtggcggtgtttattgttacaatccctataccggcgacctgttgacaaaaattgtcgtaccggccccccacgtagcgtcatgcgcttttggaggggataagctcgacacgctttatataacgaccgcccgtgctggattgagtgaggaacagcttgaggaatatccactaagcggtagcgtattctgttgcaagcccggagcgaaaggggtgccggcgaattgtttccattaagaatccgcgagcttaataaatctaattaacacaattgtcaaccaaatatcaatttaaattgtttcctttgtagacatggcgtgcaaaagacgaggcgtgccccgtctccacaaaaacaaatgcaaataattatacagaatggcaaagaatagaccagcaaaaaaagataacaacaaggagaaaaaaggaaaaaaggaaaagggtgttggtaaacgtatgaaaaaagaagcgatgatccaagccatcatttccgttttccaatcctctcccaaggaacctttcaactataaacaaatcagcaagatcatcggagtcgagaaccaagtgcagaaattgcaggtggtagacatcctgtatgatttgtccgccgaagatatcatcaccgagatcgaccgtggccgttaccgtctcaacggattgggaaccctagccgtaggaactttcgcacgccgcagcaatggaaagaattctttcatccctgaagacggaggtacgccggtatttatcgctgaacgtaattccgggcatgccatggatggagacaaagtgaaagtacagcttttcgccaaacgtaaaggtgccgagccggaaggtgaggtcgtggaaatccttgagagcaaggagcgtactttcgtaggtaaacttcaagtagctaaaggctttgccttcttgattacggaaaacaagacgttggctaacgatattttcatccctaaggataaactgaaagggggcaagaacggcgacaaagcgatcgtacgtatcgtggaatggccggatgaagccaagaatccactgggtgaggtcatcgatatattaggtatcgccggacagaataccgccgagatgcacgcgatccttgccgaattcggattgccttacaaatatccttcctcggtagaaaaagcggcggataagatcccggaagcgatctctccggaggaaattgagaaccgggaggatttccgggggataacaaccttcacgatcgacccgaaggacgcgaaagacttcgacgacgccctttccgcacgccgtttggataacgggaactgggaggttggcgtacatatcgccgacgtaacacattatgtgaaaacggacggtgtcatcgataaagaggcgcaaagccgtgcgacttccgtttatctggtagaccgtacgataccgatgcttcctgagcgactttgtaaccaaatatgctctttacgtcctgacgaggaaaaattatgcttctccgctgtcttcgaactaaatagcgatgccgtggtacaaaactcccggatctgccgcacgatcatcaagagcgaccgccgctttacctatgaggaagcacaagaggtgatcgaaaccggcgagggagattataaagaggagattctagccttgaacgaccttgccaagaaattgcgggaacgccgtttcaagagtggcgctatcaacttcgaccgttatgaggttaaattcgagatcgacgaacaagggaaaccagtccgtgtttatttcaaggtctcaaaagacgctaataagttaatcgaggagttcatgctattggcaaaccgtaccgtagccgagttcgtgggccgtcctcctaaaggaaagactaagaagacatttgtttatcgtatccatgagcttccggacccagataaaatggagaatttcgcctcttttatccgtcgcttcggctataagttgaaaacagacggcacgaagacggatgtctccaaaggaatcaactccttattggacaatgtacaaggaaagccggaagagaacttgatcgagacagtggcgatccgtgccatgcaaaaggcccgttactccacggagaatatcggccactatggcttggctttcgaatactatacacatttcacctctcctatccgccgttatccggatatgatggtacaccgattgctggaacgttatctagctggtggccgtagcgttatacaaaagaagtatgaggatttatgcgatcattgttccagcatggagcaagtcgccgccaacgcagagcgtgcatccatcaaatataagcaagtagaattcatgcaggataagctcggcatggcattcgacggcgttatctccggtgtcaccgaatggggactttacgtagaactgaacgagaataaatgcgaggggcttgtaccaatccgtgatctggatgatgattactatgagtttgatgagaagaattattgtttattgggccgtcgcaagaaacgtcaatatcgtttgggagaccctatcactatcaaagtagcgcaagcgaatttggaacgtaaacaacttgatttccaattagcggaatagggcctttctcaaagtaagtataacttcatcagacaacgaagttatacttacttaggcattttgattatacttactaggacaagtaagtgtaatttactttttatcaccaatacataagtcccagcgccccacaagcgatcagcccgattcccaacaacgcatagaagatacgtgcgccgccacgaccgaaccagttcacgaaagtcatcgccccgctggttttaaagtaccaatcaaaattacagatcgccgctacgattgagaacaatcccaaagcgataaacaaggataagataaagtattcggaaggatccatagacttacttaacctctacagtacgtgaaccgtccggattctccgagatcgttacatctaccacatctccgggcaacaactcatctattttctccggccattcgataaaacataaagctccgctatagaaataatcctctgttccgatatcctccgcctcactcaatttattgatccggtaaaaatcaaaatgataaatcaattctcccgtcgtatcgctacggtactcattgataatagcgaatgtgggactgttgatcacatcctccacacccaattcctcacagatcgccttgataaaggtagtcttaccggcccccatcggaccatagaaggcaaagaccgtacgatcatccatcccggcgataaactccttagccgcctcatggatcttatccaaactttctattttcagtatgctcatagcattcgtgtttacagtttatatggactgcaaagttcgtgatatttatgatatacgcaacttttcggcatattatcatttcggttccatcgtaataaacggcaccaacatctcctccatcgagattcctccgtgctggaatgtatttttataataggatacgtaatagttataattattcggataagcgaagaaattctctccgtaggcgaaaatatacttactgcttagattcggggagggaagtcctactttttccggatcccggatctcgaatacctctttcgggttataattcaagttcttgcctactttatagcgtagattggtattcgtattcttatcacctatcaccttgatcggattcgttacccggatcgttccatgatcggtcgtaacgattacttttcctccccgctcggcgattcgtttgaataactcgagcgtagaagagtgctggaaccatgatttagtcaagctgcgataggctgcctcgctttgcgccaactcacggatcatcttactctccgtacgagcatgcgaaagcatatccacgaagttcagcacaatcacattcagttgattacgagtaagagaagggatcgtagccaacaatttctctccatattgggaatcgtgtactttattatatgagaaggtatatttcttacggaaccgatcgatctgggtttgaatcaatggagcctcattcaaattcttaccttcctcgctctcctcatccacccacaaatccggaaacatctgctctatttgcgaaggcatcaagcccgagaatatggagttgcgggcatattgcgtggcggttggcagtatgctataatacaagctctcgtcaaacgtaaaatactcagtaagcaattcttttaccacccgccattgatccagccggaaattatcgatcaatataaagaaaaccttctcgtcattatccaacattgggaagactttcttcttaaacaggtcggggctcatcaacgggcgatcggccggattctgtatccagtccacataattcttcttcacgaatttggcaaaagcgttattggcctcttccttctgcatacggagcatatctgtcattgccacttggctgctttccagttccagttcccagtacaccagtttcttatagacctccatccagtcgtctgtggtcaaggaatcattgatttgcataccaatacgaccgaattcctgctgataacccaccgtggtcgtctcggagataatcacgttcttatggacattcttcttgatagagagaagcaattggttgggatttaccggtttgatcaaataatccgcgatcttatttccgatcgcctgattcatgatactttcctcctcacttttagtcaccatcacgaccggcacattcggagcgatctccttgatatgcgacagcgtctccaacccagtcaagccaggcatattctcatcgagaaaaataatatcaaacgattgttccttacagcagtcaatagcgtcttgcccgctcaccaccggaacgacctcataccctttgtcctgcaagaacaagatatgcggtttcaacaaatcaatctcgtcatccgcccaaagtactctgtctttcttcgctgccatatgcttacctagtttatttacaaaaatatcgataatccttcatataacaacggattatagagatgtttcgtatataggatgatttttaacatattaagaagccaatatctcaccattctgggaatggcagagagactggttcaaaaaacttttacttttcatcaaaacacgtacgtgtttggagtaaaacatgcacatgtttataaaaagctatttatcaacgaattaaacaagcagtttcaaataagacttattgttaattatcgaagtgttaagtgaataacttacggcttgtcaagccacaagcttacgagttaggaagtgataagttattcacttgggaaactttattctagtggtttagcgcaggtctaaacaatctcccaacaacccagattccgatcctctttactaaaggaaacacctattttcaccagttcacgcccatcagcctcataaggcagcagataacctttctcgtcaatctgcctcaaggcatctttcacggaaccgtccagcttgaactcaaaaacataaatataatctttcgtctttactaccgcatccgcacgtcccttcgcaccgcgcaccttcgcatcacagaattgtcccatcaatttaaacaccagataaaacactacttgataatgacactccgttttagcctttaactcataagggaaatcagcgaaaaaggcttttaaacgagtgaggaaggcatccacatctccagatctcaattcccgaacaaacttcccgatataagaaagacgaggcttccgcctccacatcatcaattaaagtccgaagatcgtagttccgcattcctatatccataagacctaatgatttaatgcttttcacaaagatatccatttttcaccgctcaatctgttcttaacatcttttttagcccaatactgtttttctatccaaaaatttctacatttgtcatccaatctacattgaaaatgaaaggagatgatttcaatagtatctatgaacgaaattaccgacggtcatttctgtttacaaaatcatatgtacacgacgatatggcggcagaagatatcgtggcagaatctctcgtgaaatattggagattatccctatcacaagaggcagagacctcagaaactcttctgctaaccatattaaaaaacaaagccttagattatttacgacataaagtaatccacgaatccgccattgaaaacatcatggaacttaatgatcgtgaactcaatattcgtatatcgacacttgaagcatgtgatccagaagaaatattctctcacgaaatacaaaccatcatacacaatacactacaatcattgcccgagcaaacccgccggatattcgagatgagtcgtttcgagaataaaaccgtgaaagaaatagcggaagagaccaacattactgcaaaaggagtagaatatcatataactaaggcattaaaggtattacgtatcaacctaaaagattacctgcccttattttattttcttttttcttaatttttttcgcttttccactagggatctacctcattgtatcgtttttataatacaaagcgaaattaatagatattcatggagcaattactacaacgatatataagaggtgaggtttccgaagaagagagactgaaagtagcgtcatggttggacgaaagcccggagaatatgcgtgaatttctagctttgcgcaaattatatgatctctcactttggcaaagtgatacaaacgagaaatattccgttagaaagagacatttctcaatacaaaaaataactatcgagctcttaaagatcgcagccatctttttggttggtttttggggtagtaaacaactattgacacaacaaccagacaaggcacaaatgcaaactattcatgtaccagccggacaacgggcagaggtcatcttggccgatggtacacatgtatggctaaactctcgctcaaccctaaaattttctgaacaattcagcgcaaacactcgcaacgtggaattagacggcgaaggctacttctccgtccagcacaatgaaaaaagtccatttaccgtgcaaactccaaagtatacaatccaagtattggggactgaatttaatgtaaaagcctatcacaacagcccattgtttgaaactgcccttataaaaggaagtgtagaaataacttcaccggagttatctcaaagtcttcgtctaaaacctgatgagatcgccgtagccaacaatggaagactagaaacatctcacatctcggattacaactatttcaagtggaaagagggcctattttgttttgaaaatgaatcgatccaagatctaatagacaagttacaactttattacgatatccagatagacgtacaacgcccatccctactccagtatcgttactccggtaagtttaggattaaggatggagtcgaacatgtgctaaaagtacttcaattaaaacataagtttacttatacgaagaatgaggaagagaatttgattataataaaataaacacatttattcactacttaaatcaatatgcctatgaaacagaaaagtcgataaattcaatcggtatgaaaaaccgggaaatgttgcagcatctcccggcagaagtcagcaccgaattatccttaaattatttagtactaacattaaaacatcacaaatgtatggaaaataaaatatttcgagtcatgaagttagccttaacaacactatttatttttactaccggattattagcttctgttcgctcacaaaatatgcgtatagactttatactaaataacgctaaaacgtacaatattctggaggagattgaaaaacagacagactatcttttcatttacaacgttgaagaagtggatcttgaacgaagaatctcaattacagcctccaaccaaactgtaacggagattttgtccaatatcttcaagaatacagacacgatctataagatagaagggaagaacatctttctgatgagaaaagaggtaaatagagattcatctccccaacaaagtaaaaaaggaattacaggaactgtaattgataaaaatggagaacctatcataggagccaacgttctcataaaagggacctctatcggaaccattacagactttaatggaaaatatacactggaagttccagaaaacgctattatccaaatttcatacatcgggtatttgagtcaagatatcaatgtaaacggcaagaaagaaataactgttcgtttagcggaagatacacaaagtttagatgaagtagtcgttgttggctatggtactcaaaaaaaaggagaagtcgcaagtgcaatctcttctatcaaatccgaaaatttcatcaaaacaccgtctaccgacccagcccaacttattaaaggacaagtaccgggtttaagcatcatcacaccagacgcaaatccaacatctacatccgaaatttctcttaggggaatcacaaccctaaaagccagcgcaagcccactcgttttgattgatggtattccaggagacttaaattcagtttcacctgatgacattcaacaaatagacgtattaaaagacggctctgccgcagcgatctacggaacacgtggaacaaatggcgtaattctgatcacgactaaaaacaccttaggagaaatgccaacagaggtggacgtgaacgcatatatatccacacaacaaataataaaaagactgccttttatgaatgcggacgaataccgtcaacgagttaaagaaggagtagccggggctcaagacgatggtgctacaaccgactggctagaccaagtaacccgtaccccatttactcaaatttacaacatcagcttacgaggtggtagtcgtacaacaaattatgtagctagttttgaatatagggggttaaatggattaatcaagcgaaccaacaaccagatgtattatccccgtattgaaattacacatcgtatgttcaacaataaattaaaattaaacgctagtttaagcggatataagcaaagttatttctctggctcggatggaggaagttataacagcgaggtttacaggaatgctctgatatacaatccaacaacacctgtctataatgcagagggaaaatattcggaaagtaccaaaaacgaatattacaatcctgtcgctatgctaaatgaggttgaaggagaaaatcaagctacaaatttgaggatgtttggaaatatcacttacactccaatagaaggcttggacattaaatatctcgtttcttccaacacttataatcaaacacgaggttattacgagacgcaaaaccataaatctacatggagagatgggaaaaatggttacgcatctcgcggaacaacacgaaaagcgcaagatctatcagagctaacagttcaatggaggaaaacactactagaagaccattcattcacgctattggccggttatagttggcaaaaggatacatatcaaaattattatatgcaaaactatgattttccatctgacgattacacatacaataatatggaaaccggacaagccttaaaagatggcaaagccacggaattctcagaagcaaacgaaagtaggctgattggttatttcggccgtttaaactacagttacaagggtaaatacatgctagctgccagtattcgtcacgaaggatccaccaaatttggcgcagatcataaatggggaaatttcccctccgtatccggtgcatggaatattaaaggcgagaatttcctaaaagatatagaagaactatccaccttaaaattacgtgcaggtttcggtataaccggtacagttcccgatgatccctatatgtccttaaacacattggatttcggcacatatgtatattacaatgggttatatataaaaaccatccgcccagattctaacgctaatccagatttaagatgggagaaaaagaaagaggttaacattggtatagatttcggatttctggatgatcgtatcagcggtaatattgactattataatcgtaaaacagaggatctgctatgggattataccgtaccatctccaccttatctctattctagtatggtggcgaacgcaggttctatgagaaattcaggtatcgaggttggtataaccgcaatacccatacaaaccaaagattttcaatggacaacctcgaccaactactcaacaaataaaaacaagctattatcactatctaatgatcagtttatatctagtggttactcagataaaggttccaccggagaaccattacaaaccactacacatcgcattcaagaaggtgaaccaataggtaatttttggggatacaaaacaattgatattgacgataatggacattggatcatagagggagcagatggtaaccctaaaccaatctccgagcaacaaccaacagataaacaggtcatcggaaacggcttacctaagcactaccttaattggaacaattctatcagttggaaaggtttcgatttttcagtaactatgcgtggagctttcggatttgatatcttgaatatgccacgcttacaatatggggctcctgtcatgctagcaagaggtaatgtactaaacgaggcattcgacacaaaatttggcaactctcctttggcgatagatcaggaacttcaatatgtaagctactacatcgaaaaaggcaactactggaaaatagataatataaccctcggttatacattcaatttcaatacatggattaaacggttaaggatatatgggacagtctctaacttagccaccatcactggatattcaggaatcgatcctgaggtcagtttaagtggtttgactcctggcgtagataacaaaaaccgttacccgtctacccgaacttacacatttggtgtttctattaaattttaaatcgcaataaatcatgaatacttatataaaaattctattaggcacttgctgctcttttagcatactttcttgcagcaacaatctggatgagaccgtatattcgaaagtaacagaacaaacatacaattatacagtagatgatttcactccttctatagcgagtgtatatagttatttacgtagccaatcagatcattggggatacttttgcgcacaagaagtaagcgcagacgcaatcgttatgccacctaatgcctctggttgggatgatggtggcgcataccgccgtatgcattatcaaacctggaattcagagcaagaccatgtgaaaaatatatggtcatggttctatcaaggggctttactatgtaacaaaattatcgaacaaattgaaacaggggtaatacccacaccctccgacacagaaaaaacacaaggattagcagagcttcgggctatgcgagcttactactattggcaaatatgtgacaatttcggggacgctcctcttgtaacaacaactgcgatggatttacctgccaaaaatacacgcagagaaattttcgactttgtagaaaacgaacttatagaggtaatacctaatttaagcgaagaagtaggaggcaattattacgggcgaatgacgaaatgggcagccaaagctctattagccaacttatatctaaacgcacaagtttacataaacgaagcacgctggaatgactgtataacccaatgtgatgatattataaacagcgggaaattcactttagctgaaaattacaaagatctttttagggccctgggtgtcgaaagctgtaaagaaatcatttttacaatcccttacgacgagaatttcgctacgggaaacagtatatttatgttttcttggcacggtgaactaaaaaagaaatacaatacgattgatacaccttggggatgtggatctgccatgggagttactcaattcatagacacttacaatgaaaaagattcacgtttagccgatacttggcttatggggcaacaattggccgctgatggtactcctttatacggaacttatgataaaatgggagaacccctgatctacacgaaggatattcctagcggaaattataccagtgagttggaaggctacagaatgaataaatttgaggtcgctgaaaattcatattccagttcaaacacagacattcctgtattcagatatgcggaaattatgatgatgaaagccgaatgcttgttacgtacaggaaaatccggggctggtactttggttactcaagtgcgccaaagggcgtttaaagataatcctgaattagcgacagtaacagactcccaattagcgggaaatacttgctatcaatatggttatgtggaagattataaaatcgtagatagaggaaacactgatccaatccaattcggaaggatgtatgatgagctgggttgggaatttgcttgggaaatgcatcgccgcagagatgccattcgttttggtatatatacgacaaagagctggttatctcacaagcctgagggggattatcgttcagtattccctattccggaaacagtattgacctcaaatccaaacctagagcagaatcctaattatttataaacaaacataatgtccaacctaggtgcccttcttttagaaggacacctacaataaaaccattatatgagcaggagtcatacacacattttctatttacttattggactttgtttttctgtaaatattcaagggcagattttagatcgtcatttatctgatttatatgcggataaattcaaccagcaagataaggaaatatacatacagtccatatcgaacaaacaagctaaagattttctcgccgaaaacattccttttttcgaatgtcccgataaagatatcgaagagatttattatttccgatggtggacttatagaaaacatataaaagaaacaccagagggatttataataacagaatttctgcctgatgtctcttgggctgggaaatataacggaatttgttgtccagcttggtttcatttcagggaagggagatggctacatgaacagcgttacttgaatgattacgcctattactggttaaggggtggaggtgatgttcgatcctatagttttcctatagcgaatgcaatctaccaatattttttagtcacagggaacgactctatattaaaagagtcatatcctgaactggtctctaacttcaacggatgggaaaaagagaaatttaattccgaaaccggccttttctggcaaacagacaaccgtgacggcatggaaatttctatcggaggaaatggctatagggctaccattaactcatatatggcagcagaagcaaatactctttcttgggtcgctcagaaaaagaatgatcctcaaggttcctattttcacgagaaagcagaggctatccgtaacaaaatgtttgatttactatgggacgaacaggcttcttttataaaagtactgcctatggatagcaaagcaatattacgcgatgtcagggaattgcatggttacacgccttggagttttgatctagcaaatcattcttatgctatcgcatggaaatttctaatggacaaaaaccatttttttgctccatatggtcctacaaccgcagaacaatgtcatcccaaattcaaagttgtctatgaagggcacgaatgccaatggaatggtccgtcttggcctttcgccacagccatgacattgacagggttagcgaatttactgaacgatcaagaacaaaactatatatccaaagacgatttttggacattactgaaaatatatacaaaaagccaacatctcacactcgataatggtaatgtcattccttggatcgacgagaacctaaatccttttacgggagattggatatccagaaccatgttgaaaaatcaccaacctaaagagagaggcagaaactacaaccactcctctttttgtgatttagtcataagtgggctggtaggaattcgtccgcaaagcgaagacgttcttatcgtcaatcctttgataccagaagataaatgggactatttttgcctagatcatataatgtatcatcataaaaaaatatgtattctatatgataaaacaggaaaaaaatatagtaacgggaaaggattctttatcttcgtcgacggaaaaagagtagcatcagcagatgctttgacaaaaatggtttgtaaactttaaactttttattataaatcagacctactaacatcaataggtctgatttataaaagcattgattagattataactttaaatctcaaaaaaatgaaacagttcgtattattatctttgacatgtctaacattatggggatgtaaacaagctccccataaagaagctcctttcaaaatgattgaccaagtggacttctcacaagttcatatacaagataatttctggtctcccaggttaaagaaacatatatcgaccactttgcctgtttgtattgatcagatcgagaaccagacagggcgcatccgcaattttgagaatgcggcaaaaagggaaggggaacattccggtattttctttgatgattctgatgtatacaaagcgttggaaggcatggcatacagtttgatcaacaatccaaatccagagttggagaaaaaagcggatgaatggatcgataaattcgccgccgcccaactaccggatggatatattaatacgtattacacattgaccgccccggaaaaacgatggactaatatggacaagcatgaaatgtattgtgccggacacatgatagaggcaggagtggcctattataaagctaccggaaaacgaaaactactagatgtttgtatacgaatgaccgatcacatgatgagtatctttggaccgggaaaacgagattgggttcccggacatgaggaaattgagttagcccttgtcaaactatatcaaaccacaggagagcaaaaatacctagatttcgctgattggttgatcgaggaacgaggacacgggcatggctcgaaaggtggggaaggtgaatgggatccattctactaccaagatgacaaacctgtacgtgagatgagtgatatcgctggtcatgccgttcgttgcatgtacttgtattgtggtatggcggatgtggcagcgttaaagcaagattctggatatatcgaatctttgaatcggttatgggatgatgtcgtactccgaaatatgtacattaccggggggatcggctcctcacgccataacgaaggtttcacagaagactatgacctgccaaacctagatgcttattgtgagacctgcgcttcggttggaatggtattgtggaatcaacgaatgaatcaatttactggtgactccaagtatattgatgtcctcgaacgatccatgtacaatggagctttagccggtatatcgctggaaggggatcgttttttctatgttaatcctttggaatctaaaggagaccatcaccgtcaagcatggtatggttgcgcttgttgcccaagccaaatatctcgcttccttccatctatcggtaattatatttacggaacctccaatgaggcgatctgggtaaatctgtacataggtaattctactgagataaacacagacaacacaaatgtcacgttgagacaagagaccaattatccttgggatggaactgtaaaactaactgtaactccttctaatccgttgaaaaaagagatacgtttacgtatccctagttggtgtgaacaatataccttatcggtaaacgggcaactagtaaaagctccaacagagaaaggatacgccgtattaaataaagagtggaaacaaggagacgtaatctccttatcaatggagatgccagtcaaattgatgaccgcagaccctagagttaagcaaaacatcggtaagcgtgccatacaaagagggcctctcgtatattgcatggaagaggtagataaccctcaagattttgataacctaaaaatcgcggcgaacacctcttttaatgcccagtttaatccgaaattattaaatgggattacaaccataaaggccactacgaatgagttggcaatcactttgatcccttattatacatgggataaccggaaagcggggaaaatgaaagtatggattgattataacgaatgatataaactactaatttactaacttatgaaacttcttcctaaaatattagcattatcgctcgctatggtcgttaccacttccgtagcggccaatcagcttgctaatgaaaaaacagctatctctgttaattacaaaaacaaccgttatccgttgctacagaaaccttacatagaattaccgatcggttctatccggcctaccggctggatgcaggagcaattagtacggatgaagaacggcatgactggaaacttggatcaagtatacgagaaagtcatgggccctcgtaatggttggctaggtggtgatggtgacgtatgggaacgtggcccttattggatagacggtcttcttccactagcctatatactcaatgatcaagcgcttatcgataaggtaaagccatgggtcgaatggaccttggcttcccaaaagcccaacggctatttcggaccggatacagaccggagttacgaaccgggattacaacgggacaattcccgggattggtggcctaagatggtgatgatgaaagtaatgcaacaatattactcagccacaggcgatacacgggtcattgatttctttactcgatattttaaataccaattagccgagttgcctcaaaacccactaggtaaatggaccttttggggagagcaaagagggggtgataatttaatggtcgtctattggctatataatatcacaggcgacaagttcttattggatttaggagagttgattcacaaacagacgtttaactggacggatatcttcttaaatcaagatcatctatcccgccaactcagtttgcactgtgtcaatctggcgcaaggcttcaaggaaccggttgtttattatcaacagaatcaagatccgaaacagatatgcgccgttaagaaagcggtaaaggatatacataatacgatcggtctcccgaccgggctttggggtggcgacgaactacttcgtttcggtgagccgactaccggttccgaattatgtaccgccgtggagatgatgttctcattggaagagatgctggaaattacaggggatgttcaatgggccgattatctggagcgagtggcctacaacgcattgccgactcaagtgacagatgattactctgcccgtcaatattatcagcaaaccaaccaagtagccgttactcgtgagtggcgtaatttctccacgccacacgatgatacggatatcttattcggagaacttacgggttatccttgttgtacctcaaacttacatcaaggctggcctaaattagttcaaaacctttggtacgctacggcggataatggtatagccgctcttgtatacgcaccttcgagtgtcaaagctaaggtagccaacggagtgaccgtgcaaatcgaggaagagaccgcttatccgtttgacgagactctgcattttaaattcgctttcgaggataaaaaaataaagagagccttcttccctttccatattcgcatcccagcatggtgtaatcagccggtgatcaaactgaacggagagaatgtcgtcgtggatgcatatcccggggagatcgcccgtatcaaccgggaatggaaacaaggtgatgtcctaaccgttgaactcccaatgcaagtagcggccagccgttggtacggaggcagtgcggtaatcgaacgggggccattggtttatgccttgaagatgaacgagaaatgggagaagaagacatttgaaggagagaaggcggctcaatacggtaactggtattatcaagtgacttcagattctccttggaactatgcgcttacacataaatccttggaaccagaccaaatcaacgacaactttgtcgtagagaaaacgaaagtgactaccgactatccttggaacatagagaatgccccgattacaatcaaggcgaaaggcaaacgtcttaatgggtggtctttatatagaggttcctctggttctatctcgtattttacccagcaaggcaatgatatgggcgacgaagaaagcatcgagttaatcccttatggctgtaccactttacgtataactgaatttccggtacggtaaaaataatgtaccaatatgccaatgcttattctacacaaatagatctgcattggcatattggcacattcccccattggcacattatttcaattcttcttcatcgtataatccttcacccccaaggaatcatacgcctgcaaaagcgcctcgtcattatcggagatcattaacaacttgtcgttctcctttaattccgtatttcctttcgggatgaaatagcggccttcccgtttcaccattaccgccaaggtatgatcgggtaaagtcagctgcatcaatttatttccatgggataataccgccggggtaatatcgatctcgctcatagcgctcttgatctcctcgggaagctcgatgccaaactcatcctttcgttccggctcatccaccatatccagccatttagcggcttgggtaaccgtggttccttgaatcagcaaagaaagaatcgtgataaaaaatacgatattaaagaacataccggcatgctcgatcccggcgatcatcgggtaagtagcgaaaataataggaaccgccccgcgtaatcccacccatgagatatacagtttacctttgaaggagaaattcttataaggtatcaagcaaaggaacacgctaatcggacgggcgatcaagatcataaagactcccaccataacacctacacccgtcaccggtaataactcatgcgggttcactagcaagcctaacgtaaggaacatcacgatctgccacaaccaagcgaaaccgtcaaagaacgtccccatacttttcttgtgaacaatcttagcgttaccaaccaccaaaccagcgatataaaccgctaaatagccattacccttacataaggtcgtagcggcgaaggtgaagaaagccgtagccaataaaaggatcggatacaaagactcgttatctatatcgatcttattgataatcaacacagccagtctccccaataagaaaccggcgatagctcccaccgataattgaatgaccaaggatagcccggcctcccaaatattcatacctccgctttgtatgtaagcgatcagaagcaaggtaagcatataagccatcgggtcattactaccactctccagctccaaggtaggacgcagacgctctttcaaataaacccctttactgcgcaagatggagaaaaccgaggctgagtccgtagaggacatgaccgccgccagcaataaagattccgggaaagtcaacgtaacatatttgccaaataaaccaaataaccaatagataaacccgcccgtgataaaggtcgtagccaacaccccgagcgtagccaataccacaccttgcgaggcgataggtttgacctccgcaactttcgtgtccataccacccgagaacaagatgatactcaacgccaacatgccgataaactgggctacattcggatcgctgaactggatgcccagaccatcgctgccaaacaacattcccacaccaaggaacaacaacaaagcgggtaagccgaaacgataaccggccttacctgcgaatatactaaaaaacaggatcaccgaggctattaatagcacttgctcaggattttgaaacatacgcaaaacgggttttatgattagtgatttgatactttgtcacaaagttcgtaaactttttgcaattataatcacacaaaaagaagaaatccggtcccaaatttacaggaagaccagatttattctttctatagaaaaacaaatctttcttacaaattgttcgagaatttttctatctcgcatagaatcattacttttggcaaacatacatatccgctttatgaacaaaaaacatctatttgcgctgttgttcacattactcgtatggacgagctgtaacaaccaacaacattttattaccgacgccgcttaccgagctgaggttgagaacgatttccaagcgaaacaggccgctctgcctaacggaaaccttttcgcagtatttaacgatcaaatgactcccgaagagagggaggcgttaaccttcatgtacgcctatatgccgattggagacatcacggactatagtggcgatttctatttgaaaaacatccgttcctctttccaagcacggaatgagatgccttggggcgatagcatcccagaggatatcttccgccatttcgtattgccggtacgaatcaacaatgagaatctggatgaaagccgcatggttttctttgatgagttgaaagaccgggtgaagggtctctcgttgtacgacgccgtactggaagtgaatcactggtgtcatgagaaggttatctatactccttccgatgggcgcacaagttcccctttggcatccgtgaagaccgcctacggtcgttgcggcgaggagtctaccttcacggtagccgctttacgttccgtgggtatccccgcacgtcaggtatatacacctcgctgggcgcatacggatgataaccacgcatgggtagaagcttgggtgaatggtaaatggtatttcttcggcgcttgcgagcccgaaccggtattgaatctgggttggttcaacggccctgcttaccggggtatgttgatgcatacgaaagtattcggtaaatacaatggcccggaggatgtcatggaacgtaccgatgggtataccgagatcaacgtgatcgataattacgcaccttcggctaaagctgttatcacggttatggatgccaatggcaagccggtaaaggacgctttggtagaattcaagatttataactatgccgagtttaacagtgtagcccgcaagaagacggacgcagatggcaaatgctcattatccgccggaaaaggggatatgctggtatgggccagcaaagatggcaagttcggctacagcaaggtctctttcggcaaggacggagaggttacgatcgccttgaataagaaaccgggagatgtggagacgatcgccctagatatcgtaccaccggtagacggctctatccccgcagaagttacaccggagcaaaaggaggcgaacgccaaacgtttattggaagaagacgctatccgtaataaatatgtagctactttctatacggaagagaaagcagaggctttagcgaaagaattgggtatcgacccgatgaagacagaggatttcatgatcggtagccgtggtaactggatggagatcgagaagttcttacgggagactcccgccgagaagcgtgtgcaagcaatggctttattggatgtcgtatccgctaaggatctacgtgatacacctgcgtctgtctttgcggaccatttaaacaatacgccggccgttcaaagcgaatggttcaatgaatatatcatgaatcctcgtgtggccaatgagttcctgactccatataagagtttcttcgctgcaaacattgagccttcccttgcgaaacaagccgtagagaatccacaggcattggtggattgggtgaagaataacgtctccattaacgacgcgctaaacgcacaacgtattccgatcatgccgatgggtgtatggaaatcccgtatcgctgataagggctcccgtaatatcttcttcgtggccgtggctcgtagcttaggtattccggcacgtatcgagccggtagcccgcaagatccagtacttcaaggacaacgcttgggtagacgtcgatttcgaggctgccgtacagacgaccgctaaacaaggcaaggtaatcgcttcttaccaaccaatcaaggcgctgcaagacccgaaatattacagtcacttcacgatcgccaaggttttgccgaacggtactttacagaccttgaatttcgagagaggcggtaatgtggatatgggcttgggagatacttggagcggattactgaagaaaccgttatccatggatgaaggtaattatatgttagtgaccggtactcgtatggcaaacggtagcgtattggccgagatcgagtttttcaatgtggaggcggacaagaccaccccgatccaattggaaatgcgtgaaagcaaggacgagatacaggtgatcggtaatttcaactccgagaataagttcaaacgtgcggacaacggtgaggagaccagcctgctagctactaccggacgtggctactatatcgtagcgcttctaggctcccgccaagaaccgacaaaccatgcgatgcgtgatatcgccgccgtgaagaaggaactagaagattggggacgaggcatcgtgcttctcttccctgacgagaagggctataagaacttcgatccgaaagagttcggcgatttaccgggcacgatcacatacggtctggatatcgacggggcgatccaaaaggagatggctacagcgatgaaattgcaaaacgccaataccttgccgatcttcttgatcgccgatacgttcaaccgtgtcgtatttgtctctcaaggctatacgattggcttgggcgagcagttaatgaaagttatacataagctataacagatcgtttcacaagtgtgatctgatcttttcacccatgtgaaacgatcggatcacggctgtgaaacgttcttttcacctatgtgaaaagatctatacgacaggagacactcatttcttctaccacaaaccgatcagacttcctccctagattcgttttaattcccttatttttcccgttcttcccaatcaaggattcatctctcaaaaaaataatatctttgattaaacctttttacgaaagggcagtctaaacttgcgtttagttatatattttggagtaacgagtgtaaattatcagtaaataccatacgagaacatgatgacaaagagagcgaaatggggagttacggcggctatcttattaatgatagcgggaatgatcgcttaccctcaattgaaaaacaagttcaaggcatcccaagatgccgcttccgtcgtacccacatcgggcacgagcctgcgaaaccagacacttaacatcaacgccgaggtattgaaataccaatcattaaccgataagatcatgagtaccgggagtacccttccggacgaagaggtggatttggctttcgagtcctccggtaaggtggtagccatctatttcacggaaggtacccacgtaaaggcgggcgatctgttggccaaaatcaatgacaagccgctgcaagcccagctaaagaagctggaggctcaagttcctttagccaaggatcgtgtctatcgccaacgtaccttgttggagaaagacgccgtcagccaagaggcctacgagcaagtagccaccgaatacgagaagctaatggcggatatcgagctagtcaaagcgaatatcgcccagacagagcttcgggctcctttcgatggaatcatcggacttcgctccgtgagtgagggcgcgtacgttacctcctcctcttccgtaatcgccaagttgaccaagatatcccctttgaaaatcgagttctccatccccgagagctacgcggccgaggtacaagacggaaccccgatcctattccgcatggagaaagacggtatgatgcagaactataaggcgaccgtttacgccgtggaaagcaaggtagatatggcgacccgtaccttgaaagtacgtgccacttacccgaatccgggcgagaatatcttacccggccgttatacctccgtcgagatcagcaagcgggagatcaaggacgctttagccatccccagcgaggccgttatccccgagatgggaaaagacatcgtttacttatataagaacggcgtggccgagcctcaagagatcacgatcggtattcgaaccgagagccgtgtacaggtattgcaagggttgaatgtgggcgatacgctgatcacgtccggcgtgatgcagttacgtaccggcatgaaagtttctattgacaacttgactgaataaggagaagaacgatggcaaatatttcagaaaccagtataaaccggcccgtactctcgacagtgatgatgctggtcatcctcctgttcggctttatcggttaccggttccttggcgtccgggagttcccgagcgtagaccagccgattatctcggtcaacgtatcttatcccggagcgaacgccgacgtgatcatgaaccagatcaccgagccgttggagcagaatatcaacggtatcccgggtatccgttcattgagtagcgtgagtagccaaggcagcagccgtatcacggtagagtttgagttgtccgtggatatggagacggcggcgaacgatgtacgtgataaggtatctcgtgcccaacgctaccttccccgtgactgcgacccacctacggtatcgaaagcggatgccgatgcctccccgatcatgcagatcgccatccgaagcaacaaacgctcgttgatggagttgagcgagatcgccgagctgacggtgaaagagcgtttgcagaccatcgagaacgtgagtggcgtggatatctggggacaaaaacggtattccatgcgtctatggctggacccaatcaagatggcgggttacggagtgaccccgatggacgtgaaaaacgccgtcgataacgagaacgtggagcttccttccggtagtatcgagggaaatacgatctccttatccatacgtaccttaggattgatgcataccgccaaggagttcaacgatttaattatcaaggaagacaacaacaacatcgtgcgcttcagcgatatcggacgtgcggaggtagctcccgaggacttgcggagcttactgaagaagaacggcgagccaatggttatgaccgttatcatcccccaaccgggagccaaccatatcgagatcgccgacgaagcctacaagcgtatcgagcaattacaaaaagacctgccggaagatgtcacgatcgagatgatgtatgacaacactcgctttatccgggcctctatcagtgaagtacaacagacgatctacgaggctttcctcttggtcgtattgattatcttcttgttcctccgcgactggcgggtcacgctggttcctgtcgtcgttatccccgtatcgttggtaggagctttcttcgtgatgtatatctccggattctccatcaacgtattgacgatgttggcggtcgtgctctcggtcggtctggtggtagacgacgcaatcgtggtggcggagaatatatatgtacgtatcgagcaaggcatgtccccgaaagaggcgggtatcgaaggatcgaaagagatcttcttcgccgtggtatctaccacgatcaccctgatctccgtattcttgccgatcgtgtttatggaaggtatgacggggcgcttattcaaggagttcagtatcgtgatcgccggttcggtcgctatctcctcgttcgtggcccttacgtttacaccaatgttggctaccaagctattgaagaggagagagaagaaaaactggttctatcggaagaccgagccgttcttcgagggattgaacacgatctacgccaagtcgttgaacgcgttcttgaaccataagatatggtcgatccctatcgttatccttcttttcggatcgatcgggtacttctggaagaacattcgttccgagttatcgcctttggaggaccgttccatgatctccgtgaatatgcgcgggccggaaggggctaccttcgagtttatccgcgactacgcggaccgtatcgagcaaatagccgactccatcgctcccgagaagcaatccatcatgacccgctcgtgggaaggaggaggttcgctaaacctcatattaagcgatatcaaggaacgggaacgctcgcaaatggagatcgccgagaccttgtcgaaagaagtccgcaaagagaccttggcccgcgccttcgtacaacagcaatccaccttcggcggacgccggggcggtatgcctatccaatacgtattgcaggccccgaccttggataaactgcaagagttcctgcccacgtttatgcaaaaggtgaacgagagcccggtcttccagatggcggacgtgaacttgcgcttcaccaagccggaggcacgtatcgagatcgaccgggataaggcttccttattgggcgtcagcacccgcaacatcgcccaaaccttgcaatatgcgttgagcggacagcgtatgggctacttctatatgaatggtaagcaataccagatattgggcgagatcaaccgccagcaacgaaatacccctgtcgatttaaaatcgatctatgtacgtagtaacaatggggaaatgatccagctggataacttggttaaggttacggaaaatgtggcgccgccccaattgtatcgctataaccgtttcgtatcggcaacggtttccagtggattgaataaaggatacacgatcggcgatggtctggacgagatggatcgtatcgcctcggaggtgctggatggtagcttccgcaccgctctttccggcgagtcgaaagagttccgcgagagttcttccagtttgatgttcgccatgatcttggccttgttgatgatttatttggtgttggccgcccagttcgagagtttcaaggacccgttggtagtgatgttcaccgtacctttggctatcgccggcgcgctaatgttcatgagttattcgggtatcacgatgaatatattcagccagatcggtatcattatgttgattggtttggtggcgaagaacggtatcttgatcgtagagttcgccaatcaacggcaagagtcgggacttagtttgccggaagcgatccgatcgtccgcgacccagcgtctgcgcccgatcttgatgactagcgtatccaccatcctcggtttggtgccattggtatacgctacgggcgagggtgcccaagggcgtatcgccatgggtgtagcggtagtaggcggaatgttggtatcgaccttcttgaccctgtttatcgtaccggccatgtattcgtttatatccaccaaccgaaaaaagaacattactgaataataaataaacacatgaataagtacctatatacattactattggccttctcttccctctttatggcggaggcgcagcaactattcgatctgaaacggtgtatcgaaaccggattagagcagaactactccatccgtatcattcgtaacgagcaacagatcagcgacaataacgccaccccgggaaacgccggttatctgcctaccgtagatatgagcggcggattcagcggaaatatcaataacaaccgtaacagcctgcaagacggatcgatcgagaaggcgaatggtataaacagcgagacgggtaacgtcggactaaacgttaactggacggttttcgacggtttcggtatccaagccgaatactctcgcttgaaagaattacagcgaatgggagaattgaacacccgcatgaccatcgaggatttcgtagccaacctttccagcgagtactacaacctgatccggcagaaaatccgtttgcgtaacctccgttccaccttggacctttccaaggagcgtttacggatcgtggaagaacggtattatatcggctccatgtcccgtctggacttgcaacaggctcaagtggacttcaactcggatagctccaaggtattaaaccaattggaggtcgtgcatacctcccgtatccgcctgaacgagttgatggcattaaataatgtggaggaggaaatccagatcaaggactccttgatctacccgaacccgttcctcgacgaggtagatctatggaagaataccctcgaagctaacgcctcactcctgatcgcccaaaagaaccagacgttgtctgagcttgattataaaaaggtaaaaagccgctattatccctatgtcaagctaaacgcaggctacggctacacggcaaactggacggaagtaggcaattacgacctccaacaacggctggggcttaattacggcgtgaccatcggtatgagcctcttcgacggtttcaaccggaaacgtgagcaacgcaacgcccgcatccaaatcgagaaccagcaattgcgcatccaagaactggaacttgccctgcgtgcggacatgagcaacttctggatggcctataaaaacaacctcgacctatggagcctagagaaagagaacctcgtagccgcccaagagaactaccggatcgccatcgaccgctataaactcggcgagttgtctggtatcgaattgcgtgaggcgcaaaacagtctactggaagcggaggagcgtctttccgtggcggaatattccaccaagatctgtgagatctcgctgcttcagttaagcggacagatattaacctatatccgtcccgagccggagaaagccagtttctaggataaaggccagtgccacgcctatggcacgactgtgccactgcgatggcacgggtgtgccatccgcatggcacaagttattataactccgtttaaagactagaggcttatgctaattgcgtttttttatgtaagttcgcggcaaatggcaaggtcatcattgcctaacgacaaaaggaaatgcaaatactaccaaaggttaatacattacgaaaaggatcgctcttgtaccgcggcatccgctaccgtaaaggattcggagtacattcgcctttcgtttttaacctcatcacgaaggtcatcgaggaaaaatgctcctattatagtttctatgatatagagcttttacgtaagcagttattattccgggaaggagagatcacctatccggaccggcagaacaaggggaaacgaaagacccgttccatcggcgagatcgtaaaacgggaatccatccggcccaagcatggcgccttattattccgtttgacaaactatttcaagtccaagaatatcctccagataggaaccacgatggggttgtctaccttatatctaacctcctatgccacgggattgagatgtatcgccttggaaaatgtaccggaattcgccacgatcgcccgtcaagcattcgctaaagagggacgtaatcccatcgatttgcgtatcggtaattataaggacttgcttccccaagccttaaatgacataaatagcttagattttgtttttttcaacactttatatgaacaacataacaacctctggctgtttaatgaatgtatgaaatacgcgcacaacgacacggtattcgtttttgagggaatcaaggcgagccgtaagatgcgtgaactttgggaagagatctgcgcatgtccggaagtgacggtcaccttagatctttactcgctagggattgtcttgttcaacaagaaattgcacaaacgagattatattgtttatttttaggattcaaaacaagtcagatatgaagaagagtattatctataccagaacaggcgataaaggaaccacttcactggtaggtggacaacgcgtgtcgaaagcgcacgatcggatcgagagctatggcaccgtagatgagctgaactcctttatcggattattaatcacggccttgaatgatgagaaagatactgatttcttatcattcatccagcataagctattcacgatcggttcttacctagccacggatcaagcgaccacggaattgaaaatcgagagcaaggtaacgcccgagagcatcgagcgtatcgagcgggagatagaccgtctggataacgagctgccgaaaatgcacgcgttcatcctaccgggaggatgccgctcggccgccctcgcgcacgtttgccgcaccgtttgccgtcgtgccgagcgacaaatctatcgcttggcagagaattgccccgttgaggagcctgtattgatatttatgaaccgtttatcggattatttcttcgttctggcacgaaaagaatgcataaataataacggtaaagaaattatttgggattatacttgcgtataataaataaagtcatattttcgcggaaaaatagagaaccaaatcgcttcggcggttattaatacttgacagctatgtattggacattagagttagcttcaaaattggaagacgcaccctggcctgcgactaaggatgaacttattgactatgcacaacgttctggtgcgccattagaagtgattgagaatttgcaggaaatggaagatgaaggcgagatttacgaatgcatggaagacatctggccggattatccaagtaaagaagacttcttcttcaacgaggaagaatactagttcaattgagaattggaaattgaaaattaagaaatagaagaacgaggtggcggacgatcgagctcccctgcctcgttgtttttttgtgaaaatacaatttatccggatttgctgcgtttgtagttacaacgtgaagtgaatgtttaaatgagaagacgtcttctttcgatcctgatccttttgtgtacttgtgcgggaatcgtacgggcgcaatatgacgcacgcttaagtcaatacttcatggcgaaaccgtattataacccggccgtggccggagctacggaggacttgaatatattggctctcgcccgcttggaaatgatcggcgtacatggggcacccaagtcgttcttcattaccgcagatatgccactcgctttaggcaagacgaatcacggtgtcggattggttgtatttaccgaggcgatcgggcttttccagaatacgcatgtaggggcgcaatacgcctataagtataaattattcgggggagtcttgagcggaggtctgcaaatcggcttagtcaaccagtcgttcgacggaaccaaggtgataaaggttgagtccgaataccatcaagagaccgacgccgccattcctgtagagcaggtcagcggcatggggttggatatgaacttcggtatttactatacccataaacggttttacgccgggtttggcatgacgcatatcacccaaccggagcttcaactggacgagaacgcctatacctatataggtcgttcacttaatttaatgggtggatacaatattcaattaaagaatccgttgatagaattacagccctcggtgttcttgctgacagacatgcaaagttttcatgcggatattaccgctaggctggaatataataagatgtttaatggtggtttttcctatcgggtgaatgaatcggtgggcatcatgttcggcgtaaagctaggtcgtttccatgcgggttacgcctttgatttcccgaccacggccctaggccgggcaagtagcggtagccacgagctatgtgtcaagtatgccttaaagctgaacaagacgaagacagggaaaaatagacataaaagtgtacgtatattatagtatatgaaaaaagtattattagtacttgtaacggtagccttgcttacctcctgcggtaaatctctccggagtgccggcggtgaggtgacaggtgtcagatcggtagcgttcaatgaacctgcgccgtatggaatggtcttggttaaaagaggttcgttcgagatgggtcccgccgacaaggattccttgtggggaatcatgccggagacgaaaggggtctctttcgacgcgttctggatggatcagacagaggtaacgaacgccaaatatcgccagttcgtttattatgtgagagactctattatccgtgaacgcttggcggacccggcttatggaggcaacgatctgttcaagatcacggaagaccgttacggggagcctgtcactccgcatttggactggaaccgtccgattccttggagacgggcgaacgaggatgagcaacgtgcgatagaaagtgtctattacacgaatcccgttaccggagagaaaggtttggaccctaaacaaatgatctataaatacgagtggtacgactataccgccgccgccctccgcaagaatcaattgaacccggcggaccgggttcgtaatacggatattcaggtagatccgaacgaggtagtcatgatctccaaggacaccgcttacatcgatgatgaaggacgtgtaatcaacgagacgatcacccgcccgttaagcagcgaatgggatttcttgaatacccgtatcgtcaatatctacccggacgagaattgctgggtgaacgatttcaagaatgcgtacaacgagccatatacccgtatgtatttctctcatccgggttacgatgattatcctgtagtcggtgtttcttgggaacaagcgactgccttctgcgtatggcgtacgaatttatacaaagaatccttgagcttgccaccgggacaattggtagagccattccgtcttccgtccgaaggagaatgggaatatgccgcccgtacaggtaagaacgagaataagttcccttggtctaccgacgagcttcaagacagcaaaggttgtttcttgggtaacttcaagccgggtaaaggtaattatacggaggatggccatttgattacgtctcgtgtaggctctttcgccccgaatgagttcgggttatacgatatggcaggaaacgtggcggaatggacctcaacgtcttactccgagtctggcccgagccaaatgagcgacatgaacccggatctgcgttacaacgccgccaagaacgatccctacgccatgaaaaagaaagtagtgcgaggaggttcttggaaagatgtctcacaatttatccgttcggacatgcgtactttcgagttccagaacgagagccgttcttacatcggtttccgttgcgcacgtacccaaataggattctctcgctccaagggaaagaaataagcgggaattataaatttaaagttttgaatcatttaagacaataatacgacgatgggaaaatatagaagatataaaaacagactggagatgttcctctccagcgaaagaggaaaacgagtattgaacttcctgtatagttggggtgcgtccatcgtaatcctcggtgcgttatttaagttattacatataccatacgctaaccaaatcctgttcgtggcgatgatcaccgagtctatcgtattctttatctcggcgttcgagcatccgaacaaggagtatcattgggaagatgttttccccgtattgaaatcaaagaacccgatggatcgtccggatttcaccggtacgccgatctcaaccatgatcaattctacggataatgtagaagacgatgagatagccgggggaataaatatcggttcggcagcgtctaaggcgaacgcgcaaagaggtggttccttgaatatcgcaggtaatctggacgtgacggaagaagataccaagaacttatccgagagcatcaagaaattaagcggagcggccgagcaaatttccaagatggcggaattgacggaagctacccaaaaatatctggagcaattatctggcatgtctgagaacatggagcgtttcagccaagtgactaattcgcttacgaacgtatccgatacactgttgaactcttataagagtatcacggataattccgatggcatcaaccaaaactcccgtggttacgtacaccagatggaacaattgaaccgtaatgtatccggattgaataccatctatgagatccagttgaagagtatcagttcgcagatcgaatctatcgaacacatcaatagtggcttgaatcgtatccgtgagatgtatgacggatcggtggtagatagttccgtattccgtaacgagacggaaaagatgactcgccaactggccgaattgaaccaagtatacagtcgtttattgcaagcgatgaccgtgaatatgggctaccaacaaccggcgcagccgcaacaacaacctcaacaaccgatgtatcagcagccacaacagcccggttaccaacagcaatatcagcaaccctatggttaccaacagcaacaacaggctccgtatacaaacaacccaatgaagtaaagaaatatggcaggaatatcaaataatcccaattctccccgtcagcggatgatcaacctgatgtatctggtgttcatcgccatgatggcactgaacgtgtcgtcggaggtgctggatggttttgagttggtggaaggtagcttgcgaacctctatcgataactcctcccgccgaaacaagatcgtagcggacgagatggaagcttattaccaagagaatccccagaaagtgggtgagtgggcattgaaggcccgtgaggtgaaaagagcctcagatagcctctatacgtatatacaagatttaaagatccgtatcgctaaggtagctgatggcgagaatgccaacgtaaacagcatcgagcataaggatgatttggaagccgcctcccgtgtaatgctctctcctgtaagcggagaaggtaaaaagctgagagcggaaattgataagtatcgtatctggatgggcggctttatcgaagattcggcgaagactgccgtattggaggcgaacctaagcacgactccccctcataaagcggggatcaatacccgtacttgggaagaggccttgttcgagaatatgccggtagcggcggctgttaccctgttaacaaaaatgcaaagtgacgttcgctacgccgaaggtgaggtcttatcgaacttattgaatagcgtagacgttggcgattaccgtgtgaaccagatcacggcgcaggtaatcccggaaagccagatcgtaatgcgaggaagccagtacaaggcgaatatcgtattatcggcggtagactctacgaaacgtcctacgatctatgtaaacggaaaagaattaccttacgagaataaaggagtcttcacggtgaataccggagctgccgggacattcccgatcaaaggttatatcgagatgccgaatagcgacggcagcatcatgcgccgggatttcgagagcgagtatttcgtgaccgagccgacagctaccgtggccccgacattgatgaacgtattatatgccggtatcgccaacccgatgcgtatcgccgtcccgggtgtaccgagcggtaatgtgacagctaccatgacgaacggcacattaacccgcagcaaggatggttgggaagcccgcccgtctaaagtaggaacggaagccgtgatcacggtaaacgctcgtatggcggatggccggaacatagagatggcaaagactaccttccgcgtgcgtgccctccccgatcccctaccttatatcgagtataaggatcaaaacggtaacgtccgtaagttcaagggaggtatgatcgccaaacgtagcttggtagaggctgacggtattctggccgctatcgacgatgatttgctaaatgtaaaatatacggtattacgttttgagctgactttcttcgactccatgggtaacgctatcccggaagtggccgaaggaaccaacttctcgcaacgtcagaaaaactatatccgcaatttaagtaagggtaaacgtttttatatcacccgtgtagtcgcaaaaggtccggacggtatcgaacgtaccataccgactatcgaagtaatcgtaaattaagattcgcagtatgaaacatctgtattacatagccgctttggccgccacttttttaacagcgatgcctcttcatgcgcaagaagaagcagagaacgatgctacgcagcaacaacaaacgcgtcgccgttcgcctcaagccagccgtggggaaagaaacgataagaaagataccggtttacccgaactgaccgtacgggcccaagatatgaacgagcgtttgacgcaagagatcgggaacgctcgctggatgcgtattatctaccggcaggtggacttgatgaaagaacagaacgctccgctttattacccgacccgcccgatgaacggacagatgaatcttttctccgtaatcttccagcttttaggtgagaacaagatcaaggcctatgagtatctggacggatacgaggagtttgacgaagcccatttgatcaacttcaaggatttgctagatcgcttctacatcctttatgaggagataccggggagagcgggtgaggaaccgactttcgtaatcaatgaaagcgatatacctgcagccgacgtacggtcttactatgtaaaagaagcatggtatttcgaccagaataattccgcttttgatgtcaagatattggcgatttgcccgatccttacctctacaggtgatatgggagagacaaccatgcctatgttctggcttccttacgagaatatacgtccgtatatcagcaattcatacatcatgacgtctaatatgaataacgccatgacttttacgatggatgactatttccgtcgccggatgttcgagggggatatcatcaagacccaaaacttgatgaatctgccattgcaggcgtattgcccgacaccggattccttaaagaacgagcaagctcgtatcgaaggtcaattaaccggctttgagaaatcactctggtatcaaccggatacgactcaagtagcggtagacagcaaagccgcgaagaaggccagaaagagcgccgcaagaggaaaaggtactacaaccaaagagcctgcctccgaaaagaaagctcccactgtcaaggctccgaaagcagaaaaatccgctccggtacgcagtgttcgacgcagaagataaaaacggactcacgatacgggtctgagcgataaccggtgatacgcaacatatgaataaagaaatcaagattagacaagagcaagagaacgactttcaagcagtaagggaagtcgtggaacttgctttccgtgacgtggaggacagtgatcaaagcgaaccgtaccttgtagaacgtttacgaaaaacggacgcttatattccggagctctccttagtcgctgaattaaacggcgaaatcatagggcatctcatgatgagtaaggtggaaatcgtatcagaagaccaaagcgtgatctctcttgggctagcaccggtttcggtggtaccgaagtaccaaaggattggcgttggtagcgctttgatccgtgaagcgcataagcgagcgggagagctaggctataaatcggccgtcttattaggacataaggattattatccgagattcggatataaaagggcgattgatttcggcattgggtttccattcgatgtccccagcgaatattgcatggttgtcgagttggcaccggaaggactcaagaacgtgcatggaatgattaaatatgccaaaccttttatggagtgagaactgtctgtaatgaaatgagacgggacataccccatctcatttcaccagataatcagatccttatttagaacctacccatgtccacttatgccaaagaccttccaacggtccgtgtttatgtctttcagcccaccacttacagaagcgtacttgcaagaagaaaaaggcgataccgatgaacatgctgaccgtataaccgcagtaaggagccagattcaagccgatcgggaaatagatcaacgcaccagcaaaagattgtgtcacataattcgtcaagctcatctttccataagagcgcaagatagaggtaaaacgcttaaaggcctcgcgctgatacagtaacacaaaggaagccaccaatacgaacgtaaaagcgaatttctgccacatatcaaacacaacacctgccgtctggcgcacgatagcgctgtccgccgtatccatcaacaatactttcagttggtataaaggaccgaaagcgatcgcagtaatgatcaaggtctttatccaaaaacgggaattctcctccgaggggataaataactttttgcgcccgatcaacattcccagcataaataacccgcaggtctgtacataccggccggcaccaacagcccagagcaaactagccttttgtcctaacgtcacgttctgccagatgaaattccataaatccccccgcttggtatgctccgccatctctgagtacatctcccctactcctaaattgggtaattggtaatccggattaaacaggctagcgatataatgataccactccaccggctgcaataaaaagataatagccgttatcaagacagccttatcgctccatttacgcacgataaacaaaacaacgcccacgatcgcatacagcagcaaaacatcgcctgccggataaaaagcggcgttcaacgtagcgaagatcgtcaacagcagtaatctccaaaggaagcggtaaccgaagtcttttcccttcgcctgctggttcgaatactgtatataaaaggtaaaaccaaataacaaggcaaagatagaatacgatttcccggcaaacaaagcgaataccaccgtaaacacgccttcattcaatacgttcaaccatcccggcagcgtagccgggtccggatagaccggatagataaaatgttccacattatgcactaataagattgccaagacagcgaatccacgtagcgcatccaccacctctacacgaggtgacttagagattgttgtttgttgcatactatttatttgttgtttctgttaaccatgctaccttttgattggactcatgcggttggccgataatatccgcataaagttccggacgacgggcatttcggtaacgatatcctccagcctgtctcaatttctcagggatagccgtagcgatcacgaaatcatcacccagtttacggcattccgccacgatatcgccgaaaggatccagaatcatcgagcaaccgttcttgatctcattataatcacgcccgatcggattggagaataccacatataccgcattgtcgtacgccctagcgggaagccatttcataagccaagcacgtcccttcaggccatcgaactcctgtcgcaaggaagtcgggtcgtttgcccggttctcccataacataggatttatcaaaccagccccggggcgaggggaaggggtacacatcgtcacgtgaggcatgaaaatgatatccgcccctaataaggccgtggcacggacattctctatgatattattatcgtagcaaatcaatatgccacatttccatcccttgatctcaaaaaccacatattgatcgcccggcaagatattcggattaataaacggatgtagcttgcggtactttgccttcaagccattgccatccacgcaaacttgcgctttatagatgcgatccccatcccgctcaaagaatccggccagtagcgtgacgccaaactctttggcgatggcgatcaaggcttgcgtactctcccccgtggggatcggttcggcaatagccaacaattccttgcgagacaagtccttggcaaacgtatatccacaaaccgagcattcgtgaaaagccactacatccgctccctctaccgacgctttccggcacatctcccggatgacagaaagattatacgccttatcgttatcccgtgtctcgaactgcacggtggcgattttcaatggttccatgatattttgatttaattggtttatatatttttcgactagattcgcaaagataacaataatatactacttttgcaggataactttttctaccgatcatgaatatcagacaaacacgacaagaagatctggccgaggtaatggctatgtacgattatgcacgcaggttcatgcaagagcatggcaacgggaatcaatggatcaacggatatccttccgaggaattgatctccaacgagatcaaggccagccatagtttcgtatgcgaaaatgagcagggcgagttagtggggaccttttgttacatcgagggaatcgaccctacttacctaaagatctatgaaggcgaatggctgaacgatgaaccttatgccgtgatccatcgcatggcctccaacggtaaacagaaggggatctccaccgaatgcttgaaatgggcgttcgctcattgcgataatatccgtatcgacacgcaccgggataatatcgtcatgcagaatttattgaaaaagcatgggttcaagcaatgcggtatcatttacatctctaatggcacggaacgcatcgctttccacaaaatagtaaatgcaacaaataaagaatcatgaaacatcctattgacctagaacattggaaccggaaagagcatttcctgtttttcggttccatggacgaccctttctttgggctgaccacccagatagacgtgacctccatctataaagaggcgaaagcggatcatgcctcttttttcctctattccttacataagattatgacagccgttaatgaggtggaagagttccggtaccggatcatcgacaacatccctgtctgctttgaccgaatccacgtgggaacaacgatcgggcgggaagacggaacattcggcttcggcttcttcgaatatacaccggacaggcaactgttccttcaaaacgcacagaaagagatcgaacgtgtgcaagctctcaccggcctttgcaaagatagggaatctgaccggcaagacttagtccgtttctccccggttccgtggatcgccttcacggagatgaaacacgcttcctctttccgtacaggtgattctgccacccgcatctccaccggaaagctgatcgagcagaacggacattggatgctccctatctccgtaacggctcatcatggcttgatggacggcagacatgtatcgatcctcttagatcgtatagcggataaaggttaaagacttagataacaaacaccctcgcccttagaagatcgaccatttgctttttaagggcagaggcattcaatggcttagaggcataagcatcgaatccgctattcatgacctgttcctcgtccgacgcaaaagcataggcggtaacggcaatgatgggaatgacttcggagagcttacggatttccttggtcgcctcatatccgttcatttccggcatattgatatccattaatacgatatgaggctcatattccttaaacagctccaccgcctcctttccgttccaagcgtgtacgattgtgtaatcattcttcagtatagtctcgaaaagcttgaaattgccggcgttatcttcagcgataagtaccgtcaacttatctttctcaacctttatcttctcaaaaatgacatcctccctcacaggtttctccggcgctttgtaggggaaggtaaaccaaaacgtactacccttcccgatctcagactcaacgcccatctctccccctagatgatcgacaatcatccggcagatagaaagtcccaaaccagttccttgggcgaaagaatccaacttcacgaatcggtcaaatatcgcttcttgttgttcaacggagatcccccggccggtatcagagacatagaagcgcagcatctttttatttaggcaagaataaccgtagcttatagagccttggtccgtaaatttaatggcgttagtcaaaaggttgatgataacttgcatcaaccgattcttagcgatagatacataacaatctttctccttacgctcaaacatcagacggacattttcatttacgacccttttactcatggaacgttccagatcggacaataaggtattgacatccacgtccgaatacacgaactccaaggtcccagcctctatcttagacaaatccaagatatcgtttatcaattggagtagcaacgcgttattattctcaatgatctcggcatattcctgtttttcctccaacacgtctgtctcggcaaggatattggagaaacctacgatagcattcagcggcgtacgtatctcatggctcatattagccaagaaggccgatttaaggcgattggactcctccgccttgtttttcgcctccagtaattctcgctcaacctctttccggtcggaaatgatcaaggaagaaccaaccaacgtgagaggtttcccgttctcatcctttttctccacggcggcgcaagcttccacccactccagcccgtgcaatcctttattcggattatagatccggtattcctcctttatcttattcaccttaccgaggataagtgactcataagccttccttaccttttcgcggtcttccttatagatcttggagaaatactcggtatcgggaaccgtcagctggttctcgtcaaatagtccggagaaattcacgttcactgccttattcacgtcacaaagaatcgtatgctgaaccaagtcccacttccaaggagtgacattcgccacgtccaacgacatggacagtttctggttcacggtgcggagcacttgctgcgtcttcgctaattccgaaacatcaaccataaaaatatccacacaacccggggtattcgctgatatgatcaaaacattgaagtaacagtctgtcggcttgtagtaatattgtgtatttatttttttattttccgagaaaataagatgacaaacttttaaataccgcgacatttgcaacggatgaatttccgagccttttttccctatataagatttgtcacacttcaataaagcctccaatgccggatttagctctaaaataacataatcagtgggatactctttttcatcgaataggatacgttgtttcatatagcaaataggcatactattgaccaatctgctataatttcgcataaacattatctctttctcctgatacaatcgaatcctattcaatgaccggatcctcatgaacacaacaaaagcaataaataaaagaacaccgatccctgcgttaacataatcgccatattgttcccaaaacgtaggaggtctcatatagaatatcgtatccgcaggataacctgacgaaaacatccccctatttaccaagaccggatagtttaatactggatggggctgatccggagttataatggtattgaatacttcatttctcaaaagtccgttaatcgtgttaataagggtattggaaatattcgacgcagggaagaaaaatcctcccgccataccattctccacaatatccatatcattcaaggtaaagacaggcagatccgtatacgaactgatcatgcggtaggtatccgaacttaacacctctttattaccttgcgtatgtaacaatatccatgagtaatataatatgcctgtctgtttgtccgcattttgcagaatatctatcaattcatcagtctgtatatcaccggcagtgaccagttccaatttgacatccgggaaattattggttatggctttatgtatggaattctggttttgcgcactaatataccgcttatcagaaaggaataaaagtcgacgcatatccggattcacttgcttcataagggaaactgtctccatgatatattccggcacataaataattgtcaattctctctcggtctcgacaatatccgataagttctgtcgttctggttcaggacaagcttttttggaaagataatattcccggggagctagatagtccttctctacgcaaaccaaataagataactccccaccccatttctcgttgagcctgtcttttaacaaagcgtatgagctattacctagcaaaatgattaatttaggggccttcttatatttgtccaataaatataaggtaaaatcttccacgtccttctcatttttcatcagcatcacatccatatgctccgtataggcatcaatatcctcattacccgctaccatacgttcatagatcggagtcgtaaaaatacggctccaaggcgtggattccgtataagaattaataataaggatatagtccgcctgtccgttatttgatagagccaagcactgggatgagataagtatcaacaaaattgttagcaaaaagatagatttatggtaaccaccctttaatatcatgacctcttatttatttatactacaaatcaagaaaatgagtcaagctttatgcatattacccggctctaataaagatcgttcaaagatacataataaatattaactactacaggataaggcacataaattacgctactatccgtgaaatagcttttctatcgatcgatgaattaagctttcacttacatcgaaccggaataaccattcgatgttttccttatgaatcagatccattaaataaacattaattctttcccaacactttttagcgagaagtttttgttccgatcgaaacgttctatgaacaggacgaacgaacggatcattaaaaaattatcacgatggaaagagaacgagaacaaggttctgaccggcttgacacggaggaacgcaaagagttgaacgactctgatttcggattacccgaagaacggaaatatcctatgccggacgccacacacgtacgggcggctgaatcctattttcgatacgctaccgatcagcaaaagccagaattggctcgtaacatcttgagaaaagccaaagaattcggagttgatgtcggaagtccggcaatcttagagtgggcaaaccgacactgacacccactttgatctcttattcaccaatataaccgtatgtgtttggtagcacatacggtcatagcaggttatttacgcacctgcaaaaagcgttttgtcaaagatctgcgaaccggctcgtcatagagtttcaaactaatgtaagccaacacgatacttccgacaactaatgccaccgcctccggccatgcttccgcgaatgtaagattctccttcttcacccacccaaaatacaagtatataagtggataatgtaccatatacaaaggataagagatatcccccaagaatttacagatacgggcggaatgcttatcggttgttttcccggaagcccccagataaacaagcatagggaatattaggatcgcacatacggaatcatagataccgttcatccataaagcctcgccattaccgacatatggcatggagagtaaaacgacgatcgccaagctgcatatccaaaaagctcctttgacaggaatgggcttaaaaacgcgcgacattaataatccgatagagaaagaaaataacacacgcaagaaaccaccgatcagattgtattcttccatcgtccaccccacacccagatggcccgcaccggaaaaattgaatatagcgaacgaagccaatccgattcccgccaacacgacaagcgccgtaagcgccttcgttgacatccgacgaataaacaacgcatacataatattcccgatatactcaaagaacaaagaccaactaggcccattcaagggatacatctctccattcccgcggatctcaggcccggagccgggtacagccggtatcaaaaaaaggttgataagcaaagctagcatcaccatggatatggagacctgcgtgccatcccacttctcacacccttgtatacaaaacgcgataactcccaaaacagctccaaggacaaccatcggatgcaaacggatcaatcgacgtttgataaaatcctttgtcgtcatggttttccaccggtcgtcataggcataaccaatcacgaatcccgatagaataaaaaagaaatcaacggctaaatacccgtgattaaatcgttggtcgataggactcgtcgcaaaggcttcgaatacatgataaaatataaccattagcgcggcgacacctctcaatccatcaagaaggtcataatgaggttttgtgtccgcaaatgcggccgctgagatttttgagtttgacattaattgtttgagcttatttttgatattactattacttctaattcccgcaaaaatacaaaaagaccccatctttcacgttattagacagttcttttttcattagttacacataaataaggtcgcaaaatacgaagtccccagcaaagcttacgcctgccggagacttgtttctttatccgtactccatcctcacggaggtacttacggacctcttaatttattactttagtattaatattaatccaactcccgcctgttcatccgtcacggattacttgggatcgaaaccctcacgggaattgttgattatcttatttcattattcctttattgaatatccttattttacagctactttcactgtctcgttacctaccgttacgaatactacaccagcaggagcggcgatagtagcgttgtcggaagtaagaactgtctcagcaactgtctggcctaatacagtacgaacgtaagcagtctcgcctgcggcaccttggatagttacgacaccgttaccggctacaactacgatagaagattcttttgcgtcgatagattcgttggctgtcggaacctctgtgccaagcgtgaagaccattgctttttctggatttgttgttaaacctaacataccattcaaagcatatacataagctgtcttataaacatcaccctctttgacctttctttgagaagaaacgaaatattcatcatctccctccgcaagtgtgatattaaatttgaacgcatccaatcgatctgttgatttcacgctcttgtcatcgttaagctccttaacaaccttaacggtctcacctttcacgatagtagtgattgtatcaacccccgtaaggatagccgggcggaagataaccttcgtctcagacttgcctgaaccttccaaataatatttctcgtccgtatattgttgcgcagaaccttcaacgaaataatgcaaagaatctgtcggattgaacatgaacattctctcagccggtttttcctcaccttcagccacctcaatacccttagagatatagaatgacggagtcttagccttgctatccgctgtatctaaccagaagatcatgctttcagcggacaagatgccctcgttgaagccattcttattcaactgatagttgatagagcctaacatattgtcgaaagaagcgtgacgaggtttagcggccaatgacgggttgaacggattagcgtccaaaacctcaacgttagcgtaagcctcattcaaggctttagctgccatataacgatcaccatcgaaagaaaccttcaaatctgttgttccaatttttgctgttttcgcatttgaaccagtggaaccctcataactaagcttaccgtctgttacatccttcaccgcaactaaagaataagcgccagcggcattcttaacaacagcgaactctgtagcggcatcagcagccttatctctagatgcggcagcgccaagatatttagcatcatcacctttggcttccgtatagcgtaaaacataagtcggaacaaccaatgtatcgccatcagccttcatgacaacctctcccttatcattcaaataagcgaaagcatttgtgcttatcacataatcctcaacaccttgcagagatttagtagaatgatctttcgctccctttattctttccggataaagaacgattaaattctcctctttggttgaagccttcattgttttagtcgcattgtcatcaatagcgtaaagagctttctctccgaataacgcgtccttaccattgaatgtcatcttaaagccttcagcgatctgagtatccgtgaataccttatatccgtccgtacgagtcgtagcgatcgtgttgaacttaacggaagtattgtttgctaaagctaacgctgttgttacacccttatttgcggcgattgttacatcagtgccgttgtacttagcgttaactaccttatagccaccttcagcaccattaggttgtaaacgtaatactaaatcatcaccagtctcacggtttgtcaatgtaaattcatatttgccgttgaagccagaaacgatccattgtgataccggcatagtgaaatctacgctattataagcggcgacacttaagcttgaaccatcagcaggatctattgtcaaatacttatggtactcagtttgtgaatcagcctcatcattctcactcttggttgagctagtgaagtagatattaaccacattctcaatgttcttcttcaacaatactgaagcgtcaaggtaagagttttcacctagttgaggatggatagcggaatatttcgttcctgacattagaacagaagtaacataagttttcgtatcagaaacagatggcttaacagcagctacgtaaaccttcgtcgcagctgttgtttgatcttttttcttataatcaacagtcaacgtcaatttaccatcctcattcaatacgtctttcgccgtaatcgtaaagtttgcgttagagcaagagtcagcgttggctgtagcaaccgatcccttcatccaatacaaagcatatccctcattgtcttgcttaccattgatgtcataacgattagagggatctaaagctaagaatgtaatttcttgagccgctgtcaagattgcgtcattatctggagtctctgcatttaccgcactaacaaatgccttaactttcttcgaatcacctttcacgaaataagtaccggcagccaacttattctcatcagaaggttgagttgccgcaacctcatccgtaaatgatacgggaacaaccttatcaaacaaatttccaaccagttcattcgttgtataatcgaatgacaatgttgtgccatttgaattatagtcattcaaataagcggcatcaataccctctgagcaagagaatgctttcaagccattctttacttcttttgtaggtacagttactgtatacaaacctgagaatttcaacttgccctctgatacagcgaacttagcattcaactcagaaagattgttgccggtagcggcagtcaacgcattaccgtctttatcggtaactacctgataagccacaccaccaacattagcccacaactcaaaagagttagatgaataattacggatagtaaatacgactcctgtagtcacatcaccgtcagcatcaccaaaagaaataaccttctttttgtccttcgtcgtaagaacatctgtaaccttcaacaacgtattctcagacgcacctagataaaagctcattccattagcaagagccgtcttattctcgctataggaaattacggtcttagtcgtaagatcagtagcggcatacgcagcattaaaagcaggtccacctagcagtaaaccagctgttaacaaggtaaaaatccttttgttcataaattcaaaatttaatattaataatagtgttaattaaagtccatcccgtcgtttagcacccttgttttacccgaaaacgactagtctaaacgatcgtctagatcttgcgttttttaagggggtaaaaagaatggttcgtgaaaggaatcggctgtttcgtaacggatagcctatttgattgataagaaagaggataaggggtgaaaaaaatagctcagaagggttgcaagtatcgaagaaacgcgtacctttgcaaatgactaaaagaatcgatcgtttaaactagtcgtttctatcccataaaagattgtcaaacatcaaggtttttaactacatataatgtacaggcgtacattaaaataatgtaaacctatcaaagcataagatctgaatcaagcttcctctttgacacaaaagtactaatagtaccgctagcttcgagttataggtattttataggctcacccgataatcattgggggtatcttcaggctcatctatatttcagccggcagcctaagacaagtcgacctacagaaatatagaagtcggccaacagatgagatcatggaataaccattgccatataaatctctgtcttatatcctgttaatcaacaggccaactcacttgagaaaggcttcccaagtgaataactaaccacttccagactcgtaagcttacggctacccccagccgtaagttattcacttgacaaaccgtaagttattcacctgacaaggcataaattatacattaaccgtctctcccccggtggttatcgggaaatggcagaggaactatagatacaagtggcccatttgtctttttgacaacttgtaatctgaagtcccggagaatcgattattccgtacccaagtgcgtctcgcttccaaattcgagagaaaaaaacagcaattctctgtttgatagccgtttgctgaaaaacagccttccgttccagccgaaataattcaccctagttcatgttttacggtcgttaggcggtaataatgcccaacgctaccgcatgtgagggccgatacctatatatgtgtaggcttacgccactatatgtgtagcttgacgcgactatatgtgtgggttaacactgctatatgtgtgagttgatacagccatatgtgtaggttgatacgtatatattcgttaaaaagcgacgcttatcgtgttaaaaagcggttgtggtagcttgttcgcgctccccgcttacgctcgttggcttttatagccagagagccgtgtcgtgaaaaagaaagtatttcaatcaaaaagataccattcatcgcattaagctgacatccgcaattcttgtcttatccctttgaattaagtctgtccccaataaatatcaggtgagcgtttacttgattaatattggcaatatatgaacgatgaatctacagaaaaatatcttgaggcaacgattcgtcagcaaccacgtcactggctcatagacaaaaaacgaaacggcagacatctccgccgtcccgcccaaaagagatagccttatctctgtttgtacacatgtcaaggttggttgtttactgatatcagggcctatataaaccctgtttttcatatcgtgcgtaaacataagactttttttcgacaaaagagcagattccttcttctttttgggaatacatgttctaaacatgccacactacctcttggctactagcgtgagcttctattatagaggaactatgaaaaagcattttacatcaaaacataaagctaaatcctttcttctgcgaagcattgaaccgttcaatctccaaaggaagggatttctttaactgattagccataaatattaagaaagacctgcgtatgatgcaaattgccttcagtcgttttaaggattttctgaaagaacagtagccattatatgaatgtaacatcaagcccgaacttattactaaagatatgatggttctgtttgtagactatttgcaatcccgtagcgttggcgagggagcaaaaagtatctatcagcgtttcaagaaagtgatacgctatgccatcgaacacgatgtgatactgaaagaccttacatataagaatgtagactactcaaacaagctattgaagtttgaacagaataagaccaaagggcattcttctgctagtggagtagtcattcctttgaatgacggtttggtctctattattggtgaacctcttgcggatggcaacaaagatgtgcttatatttaatataccatcctatgaaagctgctgtaaatcagtgaagcgttgggtgaaaagagccggaatagacaagcacataagctggcattgtgcccgtcactcatttgcagtgaatatccttaacaatggtgctaatattaaaacagtagccagtttgctcggacatagcgggctgaaacatacggagaagtgccattcaagacacgctgtaagcacaagcagcacactctgtaaaccttgcactaacttcccgtaactggcttatgggctgttatatcgtggaatttgaacaaaacggagaagaccgtgcagcctatggtgagcaactcttgaagaagctggaaaaacgactgaataccaaagggcttaacgaacgtagattccgggatttcagacgtttatatcttgtgtatccacagttgaaagatgaggttcttcactacgttatgtcaggttcgaaaattcggcacacaccgtctgccgaattcattgcaccaattcggcacacaccatccgccaaattgcaactaactgatagacaaaacaatgcattgacgctatcacctaaaaaggtctttaacaagttaccctattctcatttaaaaagtatatctcaattagacaatccgactaaacgtgctttttatgaattcgaagcaattaggggatgctggtcttttagagaactggaacgtcaaatcaactcattatattatgagcgtagcggactatccaaaaacaaagaagcactttcagcattagtacaacaacaaaccacacaactacagcctgcggatgtaataaatactcccttgaccttagagttcttagggttaaatgaacgggcattagttacagagaatgatttagagcaagccatccttgataatttacaaaagttccttctggaaatgggacacggcttctgctttgaagctcgccaaaaacgcatactgatagatgaagattacttctttgctgacctcgttttctatcaccgcatattgaaatgccatgtcatagtggatttaaaaattgacaaattccaccatgaatatgcatcccaactgaatatgtatctaaactacttcaaagcagaagtaatgcagcccgatgataatccaccaatcggtattttgctttgtactgaaaaaggagatactttagttcgttatgccacagcaggattagacccaaatatttttgtacaaaagtataaaatccagttgcccagtgaggaagaattcaagagatttctttcaaaggagataggctaacaactttcaataaaaacaaaggtttagttcattttagatatacaagagaaatggactaaacttaatctgtaaccttttcattataaaacctcaaaaattccatttcacccacctgctttaaaaatttctgattttcaataaagtcttgtccatactttaaccaacgttttgtaaaacctttgaacttagtacaaggaaatagatgacattggtagcagtgtgttattcctttctcaacgcaacacaggtaaaatgttctacatttttcacagcgggttttgttttcctctgctccctgacaaattttttcatctcgtgtgtagcttggacaaccgccacagaacacaccacaagcaggaatacgaccatgatatggttttattacagataaggtttttgccatccaaaaattagtcaaattcaatttatttgcctgtcgtttttgttccttcttcaccacgtatttttgcttctcaaagaatggacgagcagttagactcacttctgatgtgatttgtataataccttttgtaatagcatatcgttctatttcttccaaaagcatagttgcaatgcctttgccttgaaagtctgcgtgaatgaacatagagtacagatagccttgcggcgtaatggatgaaaaacctacaatctgagacagttgattaacagccacaataaaatagtgagtctttatcatttcctctatattggaaagatcatctccgcatgatgcccaatcttcaacttcatcctgtgaataatcacgcctgtttactacaagcacggtattcttatacaaatctctcagttcagcactatcagattgttgcgctattctgattttaaagtccattttcatctttggttttgtatcttttcgtataataccttattatcattaagggttaaaacatatatctgtttttccgaattatcgttaaatgcttcttcttcaaaacttccaaacttgtgaataatatcaaatccagcccgttccagatatgaatccaattcttgagggaaaaacatcctcatgtccaaattctggattgaatgaaactcgccattgataaaatagtgccattctatgcgattgatttgggttgtactctcataacgcattgtttgttttatcaacacatcccgtccatcatccgttgtatattcggcaattactgcctgcactttttcgctctcgacaatatactggatgttgggattaaagcaatctaacagaaataagcctcctgctttgagatgatttctaacgcaccctaacgcattgaataaatcttcgtttctgtataaatggtggattgaattaaatggaataaagattaggtcgaatttttcttgcaagtcgagcattctaatatctgcttctatgaaatcaatcactaattctgcttcgatagccttcatctttgcttgttcgagcattgagggtgtgtaatctactccgcaaatgctgtatccatctttggcaatggggatcgtaagtctgcctgtaccacagcacagttcaagtatttcagcctccttatttttcggtagccactttttgtagaattgcaaatcagatagaaaggtatttaatccatcatatatatttgcatcataaatcaactcaccaaccttgtaacctatattcatttatattctccaatattcattgtttcatatttatataccaaacttatttctattctctttcgtgtccggatggatatgccatagattaaccttattttcctttatttctgcaacccaaatagcatgaacattatttagaacctgatctgaacaaatggaatatccctgcataataaccatagaaccatttactgttacgctctcgaaaatgtttcgatatcccggataaagtctaaaaaacggcttccataccttaactatattatcagattttcctacaattcgattgttttccatatcgataaaaatatgattttcagtcattaaactggatagtgcgttaatgtcagccctactgatacattcattaaattgcaaggcaataatttgggggtctatcattatctcttctttgctatatttatcattattaccccattcggttttaagctgcgcataaattatatcatctacccaatccccacgcaaataatagctctccttaaagtgagcttcctttctgaaccccaatcgctctattaactggatagaagctgtatttctcggatcgactgaggctataatccgatgtttatcgagcgttccaaaaagataatcaactattgctttcaatgcttctgtagcataaccttttttctgataatctttatgtagtgtacatccaagttcagcctgcatattgttgtgattggtaaagctaattcccatatcaccaattaacctgttttcatctgcaagaataatggtaaactgaaaacatatattggcaatatccattgtcgccggcatattgctaatataatcacggacttcttcaactgaatcaggaaaccatccctgatacttattttccgcaaagtcagaacggtaagaaaaaatgctttctgcatcttccggttcagcaagccgtatgattaatctttctgttttaatgggatatttcaccttgttgtttataaattcatgagttgagcaaagatacaaaaattgtctagccgtggatagtcctgccgaataattacatacaaaaaaagcttgactgattactcaatcaagcttttcaacttcagtacccagagccgggatcgaaccggcatggaagtgaatccactggtgtttgagaccagcgcgtctaccaattccgccatctgggcatttttgattaaccttttagctttagcagtaggtttgtttctcaaatgcgttgcaaaggtacagcttttttttaaacccgcaagcgtttgggtaaaaattttcaaatatttttttcacagtgggaatatgtatgggattgtttcgcatagaaagattatttcgttacatttgtaaacgtataatcataataacagccaatatcatgaaagataattattgcgtcatcatgggaggcgggatcggtagccgtttctggcctttcagtagagaaagttacccaaagcaattccttgatttttttggaagcggacggtctttactgcaaatgacatttgatcgcttcgcaaaaatcatccctactgaaaatatatacatcgttaccaacgaatcttatgcggacttaatcaaggagcagttgccggaattagcggaagaacaaatacttttggaaccggctcgtcgcaatacggctccttgtatcgcttatgcggcttatcatattaaggcatgcaatccggaagccaatattgtcgtagccccttccgaccatctgatcttaaaagaggatgttttcttgagggacgttcaaaaggcgttggatttcgtgaagagaaaccgtgcgttggtcactttgggcatcaagcctagccgcccggaaacaggatacggatatatccaaagcagtgatacggtagtagatgatttcaccaaggtgaagacctttactgaaaaaccggacctcgagttggcaaaggtatttatggaaagtggagaattcttctggaattctggcttgttcgtctggaacgtgaatacgatcttggaagcgttctctaaatatctcccggatatcagcagccgtttcgatctaggtaaggataaatttaatacctcggaagaaaaagcgttcatccaagagaatttcccttattgcctaaatatatccatcgactacggtatcatggagaaagcgcacaacgtatatatgctatgtgtagatttcggttgggctgacctcggtagctggggatctttgttcgacctagcgaataaagacgaaaatgagaacgcagtattgaaaaataacgaggcaatgctatacgaatgctccggcaatgtgatcgcattaaataacccgaaacgtctagccgttatccaagggctaaaagattgcatcgtggccgagtctggaaacgtattattgatttgtaagaaggatgacgaacaacgtatcaaacaattcgtagccgacgctaaaatcaaatacggaaaagaatacaactaattaagaattgagaattgagaattatcggcaagcggtattcattctcaattctcaattttcaacttcttagcaagatatcgtacaggataccacgcagctaaaaagcctatcgttaataccgtcacaaagactgttattatatcgaccgggactacacgtaccggataagcctctataataaacgctccggcagcttcccctagttttataaagccaaactcttgttgtagcaagcaaagcacaaccccgatcaagactccgatcaaagctccaaaaccggagatcatccagccttcaaacaagaaaatccgacggatcagactgtcatcagcccccatattacgcagtgtgctcacatcctcctgtttctcgatcatcaacatggataaagaacccaccacgttgaataaggcgatcgccaatataaaagtaaggatcaagaaggtcatccatttctcgacttgcatcatcttgaaagaagcctcttgttgctcaaaacggtcttgcacgatatattgatcacctaggatacgttgaatctctttctttaccggagcgatatccccgctatctttcaccttcaattccaccgctgtcacttctttatcataattaaataaagaacgggccaatgacaaaggcacgatcatatatgaatcatcgtaaacctgttggtccgtacgaaagacagcaccgatataagcatattccaaattgaaagaagaagccggattcgccatgttcaccttctcctcccgcttcggagcgtagatctctagcggagagacaaagcctgcgtttattcctagcgagaaagccaatccgatccccatattcgcataattcgccacctcgtcattcagaaggaactttccatcgatcaagatactatcgatctgcgccagtttctcatattgctcgtctacacctttcaaggtagctacaccctgacgatctcgataacggaccaaggcattgtcctgcaatacctcactaaaacaaacaatgccgggcaattccctcaccttacgtatctcttccgaggtcgggtcgaaaaccttccctttccggggcatgatcttcaactccggatcaaaattgctgaagagagaagataccaaatcgttgaaaccattatagaccgacaaggcgcatactaaggcgatcgtggcgacaacaaccccgcataccgataccatcgatatgatatttatggcattgtgcgacttcttcgaaaagagatatcgccgggctatatagaacggaagattcaaggctcctctgattacttatgcaaaagattgtcgatattctcgatataatccaatgaatcgtctataaagaagctcaattcaggaatcttacgaacctgcaaacgaatacgttgccccaaatcaaaacggatcgctttcgtattgctccgtatagcctccaatagctcttgcgatttatccgacgggaaaatgcttaaataagctctcgccacacttaaatcaggacttacacgaactacgctgacagagaccaatacgccatgcattccttgcgtctgcttctgaaatatatcactcaactccttctgaagaaggcgttcgatcttttgtaatctagtactttccatacgctttattatttactttttccagatcatcgtcaagccgtcacgtaaagggaggatcaccttctctacccgatcgtcttgcttaaccttttcattaaaaaccagtattcccttcgtttgtttatcggaaggatgcacttcttctaccactttaccgtcccaaagcgtattatccgcaagaatcaagccgcccggacggaccatcgggaataccaaatcataatactcggaatacaggcgtttgtcggcatcgataaaaaccatatcgaacgtctcatccaaacgggggataatctccatcgcatccccaaaatggacttttatcttgtccttatgtagcgagcgggaaagatatttcatgataaaatcctccatctcgtcattgatctcgatcgtatggatcaacgccccctcttccatgccttccgccatacacaaagtggcataagacgtataagtcccgatctccaagactcttctcggacgaatcatccggcaaaacatcttcaatatcctaccctgcaaatgcccggatagcatacgcggacggagaaggttcacattggcgtcgcgattcaacgccgacagcaaatccccttcttcatctatatgagaaagaatatacgcatcaatctcgcccgtaaacattcctcttactctttaaaagtaggcaactgatattgcgtgccggcatccagcacctttcctacgttgttaatctccaaaaagctggtaccgccaccttcgccgaagctaccgctcaaatacgctaccatatcgttgcgagtgatacgtccgctatggatcagctggttcaacgcatcatagaaatatcccctacgactgtcgttgtacggctgatgaaccgcccataccccataagaaagacccaacatacgcatcacacgaggattatagcatatagcgaacacagtagaggttccgcggaaagcggccagataacgtgccgtacgacccgtataactatccgtgataatcgccttcacatgtaatttagaagaagacttaacggcttgtttcgccaagaaagaagtcacgtctaaatcattcccctcgatcggcacacggatatcattcgcggaaagcttggtcttctcggcttcacgagccactttcgtcatggtctgtaccgcctcgatcggatattttccataagccgtctcaccgcttaacatcaaagcatccgtacgataataaatagcgttggcgatatccgtaacctcggcacgagtaggacgaggattattaatcatggaatgaagcatttgcgtagccacgataaccggcttcttcacctccacgcatttacggatcagcatacgctggatacccgggatcttctcggccggaacctcgatacccaagtcaccacgagcgatcataacgccataagccacttccaaaatctcctcgatattgtctacaccctcttgattctcgatcttagcgataatcttgatagggctgttacgctcgtccaagatacgttggatatccaatacgtcctgtttgttgcgaacaaatgagtgagcgataaaatcgagatcatgatcgatcgcccaaaggatattattacggtctttctcagtcaacgaaggcaaattgatacgtacgcccggcacattcacgctcttgcggctacctagcgtagcgtcattctggatctcgcaaagcaaacaatcgccggatttcccggtaaccttcatttccagatcaccatcatcgataaggatgtcgctgccaatcgccaagtcgttcacgaaattcttatatgacacacaaatacaatcatgcgaagtttcctgatcgggattaccgattaccttcacgatctctccagtcttgaaagggatcggttccttgtttaccgtcgtcgtggtacgtacttccggcccctttgtatccatcaagataccgatacggtcggatactgtacggacgttatttaccacacgggtcaacccctcttccatcatgtgagccgtattcaggcgcaccacattcattcccgctttatataacgcctcaacgaacgcaacgtcgcagcgctggtcggaaactgtagcaacaatcttcgtatgctttaacatataccttaaattattataacctaattattaattctatttgataaccttctaaaccttctatcacataaacgattcgatcgccaaccgatacgaatccagcccaaacccaagaatcactcccctgcatgccgccgatatcatcgacacatgacgaaacgattcacgggcatgcacattcgagatatgcacttccacgactggcgtagtaaccgccttgatagcatcgtgcaacgcaatggaagtatgcgtataagcgccggcgttcaacacgataccgtcatattcaaaacccacctcatggatcttgttaattatctctccttccacattactttgataataagatatctcacactgaggaaagcgggcacgtaactcgctcaaatagtcctcgaacgaggcatttccgtatactgtcggttctcgcttgcccaacagattcaaattagggccattgatgatctgaatcttcttcattcttaattgtaagtttattacctttgtaccgcccgttgaggccggaattatccggcaaaggtaaggattttatttgacacattcataacgacataccgacaatgcgacaaggaaaagatataataaaccgatataacacctatttacgattagaaaaatcgctctcagccaactccatcgacgcctatttgacagatcttgacaaattgctacgtttcgcagaggatgagaaaaaggacgttaaggagatcagctacgacgacttgcaacagttcatcgcccaattacgtgacatcggcatccatccccgatcgcaagcacgcatcatctcgggtatcaaatcgttctatcgtttcttattgcttgacaattatataacaaatgatccgaccgaattgttagagtctcccaagatcggattgaagctgccggaagtattaaccgtcaacgagataaatagcattctcgacacgatagacctcacgcttcccgagggacagcggaaccgtgcgatgctggaggttttatatagttgcggactgcgcgtatcggagcttactggcctgcgttattcggatatatatcccaaggaaggtttcatccgggtagagggtaaaggaagcaaacaacggcttgttcctatctccgaagttgctttgcgggaaattaaaaactatctgtatgaccggaattcggtcgtggttaaaaaaggcttcgaggatattttatttctaagccggcgaggaacggccctctcccgtatcatggtatttcatatcatcaagcaacagacggaggccgccggtatccataaaaacgtaagtccccataccttccgtcattctttcgccacccacttgctggaaggcggcgccaacttacgcgctatccaagagatgctggggcatgagaaaatcaccaccaccgagatatatacacatatcgaccgggaattccttcgcaaagagatactggaacatcatccgaggagcaggccaagaacttaaaagaaccgatcctgctccgctagcaaagccccaaggatatcataaattatttatttcctcctctgacaaaccagtataacgcacgaccatttccatcgaaagcccatcagaccgcatacgccgagctgtttctagacgttcttccgcacggccttcttcccgtccttcaaacttagcagtgctcaacacgtcattctggatcataatcgcattcagatgttcgtcataagcataacgttcctcgggagacattgagtaatagcgtaatttctctcgtgcctcttccaagccgggggctgtcgttccggaagttatgatcccatctttcaagtatcgcacccattcctccaagggggtcacggccaccttatcaaactcattcacccggaccaatatatactccggaaagatctccgagggaagacgcttgacgatcgcacccctctccttggtatttacctgtaaatgatcatgggtatgcacgccgacaaattggttctgcccgtgatacagataatcggttcctacgcctatatcaaaataaaggatactgatagaatagacctttttcaccccggaatagtcctgtcccaaatgaagatgctcggtgacggctttcgccacgccatagagcacacgttccaaataataaagctcgcgggtattctggatctcgataaggatgatatctccctttgtgttcttagccttgatatccacccgattgaatttatcatcggccatttgctggtttccctcactctccaatatctcctcaatcttgatctgctcgcccaagaacacggtaagaaagccttctagcactccgaaattcgctttttgccggagtaggcgtttgatggcccagtcgaaacggatatatcgatcttgtaattccttcatatacttctcctctttttctgttttcttttccatagtcatatcatgttttagttaccccactattgggtggcttcaaatgtacataaaaagatctggaatacaagcctatcccatctaaaaagaaatgtccttctttttggatccgtaagtgaatagccaacgaacgggatcgtaagcggtcgcaaatgggtattcgtgtaccgttattactctattttaatctcatattttatcgatttaaactatttacttaaagacaaaaaacatggatgtggacaaatgatcacacatccatatctaattatcaacaaattaaaagctatcaggttctcctaaaatgaacaaatgtaaatacagctcaattcttagaaatgaggattctgtaccaaatggccatccgacttatcaatctccgactgaggaatcggcaagtatttctttgtatcatcccagcctttgataaaatctttcgcttggttcgtacgtactaaatcccaataacgaataccttccatcgcaaactcataacggcgttccttatagatattatccaatgaaaccgtcggaaccttataatcatcacccatcgcacgtttaacgactctcgcataataatcctgtgcctcgccaacgctacctccacttctcaataaagcttccgatgccattaatagtatgtccgagaaacgaattacacggtaattgtttttataattcaacgcttccgtaccaaccgtagaagaataccctgcacgaggatgatatttgcgtacgctataccccgtatattgattcacatccgagctaatcgttccgccttccgctctaaactcctcatgatctatgatcgttgtccactttctaggatcatccggtaaaaacgcatcattcaatgcttttgttacaggcgcaaacccccaaccttccacatacacattattgggatctttcaaacctctggctcctagcattattatatcggagttaccttgattggccttgcctgcccagtcattcgagttcccgatttccgtataattgacttcaaaaacagattctttgcaccactcatactcatcatcaaaaaggactttataatccgggatcaagtcatattgataggcaggatcggtaattagctctttcaattggctggcgatctccttcattttagtatcatcattctgatagagaacgatacgtgctttcattgcgatagcggcaccattcgtagctcgtcctttctcattagccgggactaccttgggtaacttcccaataacgttattatctaaatcctctattaacttcgcatagacctcatccggttgcaattgagggacagttgttatatcatccaatcccaaattcgtctcgtaatacggtatgtatccaaagaaacgccacaactggaaataataaaatacacgtaagaaatgagcctcagctacataacgatcacgaagctccgccgacatcgtcccctccggaagaagagggcatttctctatcacgatattcgcacggtttacaccctcatacgaacgcccccataaaccctcgggtaagtttgtcggtgtcacccaattggtaaaatcattcactcgttgcaactgcggttgatccgataccgtcgatccaccggtctccgcatcatccgacatgatattactaaccagttcataagagctatacgcattataagcgttccatttcaacgggtcataggcagcgaccaatgcctcggtcaaatcctcctgtgtcttgtaataatccgtttcgataaccttattcgtcggagacaactccaaaaaatcattgcagctacttagtccgaatacaacggctagcagataaatatatttattcataacactaattttaatgattaaaatgtcaaattcaatccaaatgtataaacccgggcttgaggatatacacccttatctatacccattgttgaaccaatttccgggtccatccctttatatcccgtaatagtcaacaaattatcgaacgacgcataaaatctcaagcgttgtatataagctttccgggtcaactgagccggtagcgtataacctacctgtaaattacgtaagcgcaagaaagaagcatcgtgaaccaacaaagtagacggacggaagttcttaggcgtatcacctaacacaatccttggcatcgaattggaggtacccggtccagtccatcgctccaaagcatccgacgtataattgactgccgccaactcataacggcgtaacgcatcgaaaacatccgctccaaaagaaccttggaaaaaggcacttaaatcaaagccattccaatcagccgcaacggtaagtccaaccatccaatccggattaggcttgcctatcatcgtacggtcctcgttatcatcgctgatcacaccgtctccgttcaaatcctcaaatttcgtatcaccgggtgccgcattcggttgtataggcttaccggtagcaggactgatatagctatcgatctcctcttgtgtctggaaaaccccaattgccttgtatccgaagaaataaccgattggataaccattttcgttccttgataccgtacctaaagttggtaaactctctttatcaatatatcccgtctgatttcccagattcttgatctcattcttcacataagaagcattcgccaagaaagatagattcactttatctacacttaatttataaccgacttcaagctcgataccttggtttgtcaatgtcccgacattcgataaaggcgagccacttcccacatataggggtatcggacgctccatcaacatgtcttttgtatctttcttgaaccaatcaaaactaaaagaaagggagttattaaagaagcgagaatcaaatccaaagtccaattgctccgatgtttcccaacgcaaatcaggattagccaaagaagtaggctttgttccgctatgaatgacaccgttcgagcttaccccgaaactatagttatttcctccggtcattgtcgtagtatatccaaacgatccgattttctcatttccgttctgtccccagcttccgcgcactttcaagaagtcgaaccatcccggtttattttccatgaaaggctcgttagtcaacgtccagcccgcagagacggacgggaaataggcatattgattattccggccgaagttagaggaaccgtcccgacgaagggttaactcaagcatatacctttcgtcataattatagttcaatcgtccgaaaacggaggccatccgatgctccgtcgccccaccttccgaatgctgatcgccgggagaggcactattggtgaaatcgatccacgctttatgatcatcttccgctcgtaagttcaaggccgttccctttacctttttactatcataccgttccatagaggttcccagtaaaaccgcgaaattatgtttatcgatcgaacgtttataactcaacgtattctcccaaagaagtttcatgccacgattcatcgtttgctccaccctcgatttctcattcttgaccatataacacaaataactaacagggaaccaattcctttcgccccaaaaagccatatccgtagagagagaggtcttaaacgtaagattctcgaatacttccaattcaccccaaacagatcctacaaatttatcccagtccttgttattgtttaaggtctgcatcatagcgaccggattcacgatctcttgattttcgatcacgttataaatacggccttcgtcatccttgacataaccgggataatttttttcgtaataagcgagatcttccgccgaaggattctccagatagaccgattcgttcggtggagtcatcaccgcacttgccaacgggccggagaagttgtcattctccgaaatacctttggatatgatccgtgtatatcctaggttcgtaccgaccttgaaactacggaagaatttattcgtcttattctcaaacacattataggtattgttgaaacgtaagctatatcgtttataatccgacttatcttttcctccaacaattccttcttgatctaaataaccaaaagaaaggaaatagcttcccttatcaccaccaccactgatgctcgcttgatgattcatgatcggggcattctcgttataaatctcattctgccagttcgtccctacaccagctttcgaaggatcatcgtaaatagggtccatcccggcattcacgtaagcctcattcattattgtctcatattcggtggcattcaagaccgacatttttcgccaaggattttgccaaccgattgagaaatcataattgacaaccgcttttccttttttcccgctctttgtcgtaaccaaaataacaccattagccgcacgcgaaccgtagatagcggctgaagcggcatcttttaagacctcgatagattgtatatcctgcggattcagataatcgacacctccttcaagtggcattccatccacaatatataaagggttactatcattaatagttcctgtaccacggatacggactctcgactcggctcccggttgtccggaattctgcataatgcttactcccgaaacctttccccgtaacacatcctctacccgggtaggtgtcagcttctccaaatcatcggaggtgacccggcttatggccgctgtcatcacgctcttcttctggacgccataaccaaccacgaccacctcatccaaggcttgcgtgtcctctttcaagacaacctgcaaatcagtctgcgtaccgaccttaaccgtatgggagagatagccgataaacgagatttccaagatatcgccatttttcacatctagcgtaaatacaccattcatgtcagagatcgtaccggtagtagttccttttacggaaatactcgcaccgataaccggagttccattcgtatccaagatcgttcctcgcaattttcttaccgtttgagaaacttccatcggatttacatcaggatgggaaaggccgcttgcctccagattgccacttaaggaagcgagcaataatgacccggcacatatccaacgccatcgctgatccttacttttctttttcataaattattcgaatttaaaggtttaaacaatattcctaacattactttttggttattcggactctgagtattttcaaaaaaggggtagcattcccctcgacagcactcacgaggagtgccgccgtaggaaattggatataaaagctaacctaactaatttaatgtatactcaaagtaatccttgaaagaggttaccgcatcgcctacttttagataacggcgactaagtactggtttcgccccccccttctcatgatactcggctatcaaaagataacctcctgcttttgagggcaatttcagaaggcaaggttgaagccgcttgccaaaaggttcaatcacaatagactcttcttgtgtcgaaataatagttcctttctcgtctagtagtttcaagagaacttttcctgacgagtctttattcaagtcgttcaccccaaccaagttgaagactaaatcactacccggtttcaaggcagggagatgttttgtataacgatggtccgtcaagtcgataaagaccgccgttggagcgaagcaatgcttgaaccaccggaaagccggcgaaggttgcaagtccttaatatcattgataaaccaatctcccgtgaaaccataattattggtcagatggcaaaaggccaagattccacccaccgagcgttctgaacgcagccactcggtctcaagctgtaaccaataggcttgcaattcacggcattgagccggagtagcgttctcgccgagataataattataattattgagtgtcaatttcgagggccgtccatcacgccataaccaaatccatccgtactcattgaccaactgaggaacgcccgcatctagtatagaagagaaacctacccaattctcatgcaatgcacctaagttatagggattgtttttgaagtagtcgttcagttcactggaatgcatcaacgttagcgcgcgatatgggtgtggctcatccatctcatcattcgttcccatctgatcagatgtcatatagccggcatcccagatccgggtcgggtctaattcctttagttcgggaatcagcgtatttcctatataactgtcccaattctcattgatcgcatcccagatcacgatactgggatgattgccatcgctccatacccaattcgtatactccttacgtacctgttcatcccatccatgattttgccaataaagccactcattttgcaatacgatgccatactcatcgcaaagatcataccagaagtccggaacaataccgacacatattcgcatagcgttccaatcaatcgactttggcaagtctatcatcagcttcttcacccattcccgatcccaagccaacgcttgacaatccgggtcctcaaagaaacgttgaagcgtgatattggagcctcgtaagtagaatttatccccattaagcgtaaagaatttgccttttctcgaaaaatcacgcatcccgaagttcaccgaataacgatctacaagctcatcttggtcatacaccgagacctcgccttcgtacaagaaaggggaatccggagtccaagccttcggattatccaaagagatactcgtttcgaaataagtcctattatcccgtttaacctcaccttcaatcactttctttccaaccacctgccctgtggtcttctccttgacacagaactcaatcttacaagagtccttcattttatccccatacaacatttggggtggatacaaacttctcaccaaagtcttaactgtcaccaatcctttagccagagaaggtaggaacaaaatcttgtcgacccgcatcttaccggtagccgtgatgaacacgtcgtcccagattccgggtaggtaatggactttctccttatccgtaccaccggcagcctcgctaggcaaccacgcccggtcgcccacctgaattaagatctcattgtccgagccatattttacggcactcgtaatattaaaatccattggagtatagcattccatggaagaccctacttgatgtccattcacgaagactcgtgtaacgtattggcttttctttatcgtaaggaataattgctcatccttgaatttctcgtcgataaatacttttcgcttataccaattatacattggcgtataatctctctccaagaaattaaactgttccaccaactccacgccgtcaggcttcttgaagaatttctcgtattgagaaattttcggcctagctagatgcaccaatcccggaaccggtatcttacgggtatatttccgtgggggaaaagcatgttccgtctgatcaaaatcccattccccatttaatgagatcgttgtcctcccgtcatcggcccaagcgaatacggataggaagcaacacataattaaaattattcttttcatgacatccgatttatttaactctttcacgaaggcaagttacaattattagaaacataaactttttagaaatttacctcctgcttttagaatcttatcaaaatataagaatcatcgtaatacataccatcccaagattaaagtcgtttcaataatttggctgctacttcattattcttcgtgagagactcatccagcggggaagaacggatgatagaagtcaagcgtttatgccattccacatcccgccacattccagcaaactgaggcccgcaaaaattactggtcgctacgccgacccacatacccgtacgagctgccgtaatagttcccaactcgcagagatcttttacccagtcccatttcaataaaggccaatccttataatccaccaatccccaacactctgtcgtaacaagaggacggcgattcttccgggccacagaagccataagctctatcttatcagtcaacaacttctgccaatatccaggtctttcccgataaacccgttctgcgtttttcaccacattcttataatcatccggtaaaaaacgattgtagccatatcccaccagcttataaaattctccaccattctgttgggccatccaaatatgatgctcatacaaatcaagaaaagagcaatccacctcttcatatttcttgacatccccatgatcaaaagaatataagaatggcatatccggatatacttgtcgcatcttctccaacgaggttttcatccatcgtaaggattcctccttataccaattcccccaaccgacattcggatatgtcttagcgaaaaaaggagcccacgaatcaccgggccactcattgcaaagatctacataaaggatcgtatccaataacccatcctcctcgatcgaacgaagggttgtcagccagcaatccgccaatttctccggtgtatccaatttcaggcaaacctcatccacatcgagacgataccaagaagaaagcccgaccttaatatcccgctccttacatttcgacaagaacaagttcaaattcggttgaacttgtacctcattcatatccggacttccccaatcttgctgattccaaacttctttaagtaaccatttcttcattggattctccgctattaaatgaggataagcatcaatacgtatcgcattatacccccgttccgagagctcgtccaatacttggtcccagtcctcataaccggctccgggccaacgcctctccaaccaagaaaaatcccacatggtgattgcccggggcgagatttctcctttcccggcaaaagccatttcacttttagctaatgcatttgataaatcaaaagccactaagccgcctaatgccgcaactgctgtttgtctaataaatactcttctatccatattatattattttatctttcgggtgtcctccttttctccaaaaagcctcgatattctccaatgaaactcctttcgtttccggtacatagaaatatccccaaataatcgccacaattccaataaacgcataaaataagaacgctcctgccggattcccttggctttcgccattgatcgttaaatcggttcccggtattgagaataccttcagtatcttgaaaaaggtaaacgatacgatcgcattgaaaaaccaaacggacaatgaaccgagagaagcccccagccctcttaacttttgtggaaacacttccgacacaatcaaccaacctagaggcccgatgctgatagcgaaaaatcccacatataagaaaataaggacaatggaaagccatttcccggaatcccctaattgagcggcgaatataaaagaggtagcgagtagcgacaaggaaatcacgataccgctcaaccccagaaaataaagtttacgccttcccagccgatctacgaaatagacagacagtaacgtgaacaataaattgacaactcccacccctacagaagccccaatcgcagagaccgcaccatcgaaaccggccatcaagaatattttaggactataatagatcaccgtattgatacctacgaactgttggaagaacatgataccaatagcgataaccaacgcattcctcaaccaaggctgagccaaatccttaaaacgcccttgttgctcatcatttttccgcatctcattccgcatctgctcaaatgagacatttacttgatccgggtgctcgatcatctttaagaccgataaactctcctcctccctgccaacggacatcaaccaccttggagatggtggaaccagcaacatacccacgaacaaaataatagcgggaatcacccccacataaaacatcggcctccaacatgaaacagacgtctcatccgcaaaatacaaatccgaaagataagataccagaagcccgatcgtaatcatcaattggaacatggcgacaaacatcccccgtgatttcgccggagaaacttctgcgatataaagaggcaccgcaaaagaagatatcccgatagccacccccaggaataaacgggcggcgatcaaatgataaatgcccggagcccatcccgaccataacgcaccgatagcgaaaataacagccgaagtcaaaatgactttcctacgccctatgcgatccgtcaacttaccacaacacagcgctcccagaatagctcccagcaaaccggaggaagtaacgacctccaccatactatcgtctatgccaaaatctttctggaagaaaggaatcgccccggaaatcacgccggtatcaaaaccaaacaatagtcctcccatggcggcgacaatcgctatcacataaatcatccaatatctataactcgtgtttctcatgtttttcttgtgtatttaatccatctataaactcaaggctcgaaatcacgccagacctccgctttcaacgcgggattaggcacatataagaaaatctccggattttcctcgaattgtctgtaaatagatacccctttccgaatatctaaagaaatataatccgaaggagatttacaaatcaaatgagaggaatcgtacatcggattcgcaatccattctaattcatcgcttccattaaatataggaaaccaagcgattcccccgtgtttacgaaccccctcatacacaaaaccataatctctatcgcaccacgccccgaaagtcaaaggcaatctcggattcgcactaatcgtcgcatgtacccaatagggaggaacgatcactacatcccccggaaaggcatgtaccgcataacatcgaccgggttgatcctccgcatactcctgcatataaataatcgcctctcccgaccaaatctcatagatttccggcgtagaccaaccgctataaggagatatcttatgaatatgcccttgacttctgactggctcctgccccaatttaccagcgctatatgtcactaccccgaataacaaatgtaacttattcagcaacacacgatgttcttctttgccgacatccatagcgatcgagtaaacctgctccggtcccttgcattgaggatcacgcaaactagcccgtatatcttccagccggcgaatctcgacctccggaccaaatacacccgccccataggtaaaccccataggcgattgaaccggtgttatatcaattcctttatcaaatacaaatccgttcattttgctgttgttttaccatgaaatactccaagccgaataaagcggcgtcatcgcccaatattgccgggacaaccgggactttcccggaaggacaccaagctaattcatccactcgcttactgatataaggaatgattacctcttggctttttaaaatcccccctcccagaatcaccacttccggatcataagcatgtatataggttattatcgccgatgcccagatatccatgcattcgtttctaatcaataaagcgtctgtattcccctcctgcgccaacctgaaaatgcgcttgaaatcatagatatccgcatctcgcttaaatgattccgataaaagggcatgctcccggataatggtcggcaagaaaaaagaggaagacagagcttctacacagcctttattcccgcatgaacatcgacggcccttataatccaacacaaaatgtcctcccaaagaacccgcttgaaaatgctgtccatacagaagccgtccatcgatcacgactcccgtaccgataccggttccgattgtcatcatgactacattgttctttccccgggccgcaccctgccaccattctccggctacggccaaacgagcgtcattatccatgcagaaaggaacttcccaattctcccatgcccatttatccagactgatcgaacaggcatcatcatacttctcattcgtagagattacccggttatgaattggatctaccaacccgggaaaagccaggccgatacaacgaagcgccgccacatcaatacgccaagcggccaacaaccgatcgatcgcctcctttatcttaggtaagttcagagctaatcccagagccagacgggaaggtaatctcacacagtctacgatctcaccatcagacaatagtccgatctttacgaccgtcccccctaaatctatcgctatcgtatacataagctatcgcaatttaggggtaccgttcacttctaccaatcgggccgagaagcccttattcgctatctcttcataattatgcccggcatccgaaggccagcatgcggcaaatgacaagacgctatttccagtattagctacccggtgcgctacaccgcccggtatataatgcaggctacccggcatcatcctttccgcccacgtattccgttcccggtccatcaagatcaacataccttcgccttccaatccccaataatactccgaacgatcctcttgttgatgaaaatggcctttcgtcatgaaatactcatctcccacctttcccggatataattgagtaataccaaaataaagccctcccggagtgccttcccgctccggtaaataactatatacctcgtatgctaattgatctaatggtaattgggaataagcatcttgattctcaaaaattccggcaagctcacctaaagttctccggctctttaccacaccttccccctttaactcattttgaaaaaatgacaaggatgggattacaatctttttatgttccatgatattctattttacgatacaacttatatcgcaaaaatagatcgaataccttgggctttattttagtatttttccaaacaactatgaaatcctgtccttattctccatccaggcgctccttatattttttctggtactcggatggaagcatattcgtggttttcttaaattggccgatgaagttggatagattattgaatccggcctcggaactaatcgtggatatcttcaggtttccctctatcaatagttttttcgcatgtcctatgcgcatgtcattcaggtactccacgaaagtcttcttggtccgtttcttgaaataacgacaaaaagcggtcggagtcaagcctaccaaagcggcgacttcctccagcttcactggagacgtgaagttcttcaccagatatttatagaccttattgaaacgctcgaaatcgtccgagttgaccgtttccgtaaaccccgtactggctaatatctcatattcttcggaagtcgccattaattccagtaaagcaatcaatttgatcaccctactcgctcccgtctcattggcggattggctgatcagctcggcaatcttctccgggacttacccacaaacttaattcctctacgggaacgctctatcaattcccggatattattcatctccggaagacggattaaattaggttcaaaaatctgacgcttgaagaacaagcaaatacaagtagcccgcaagccggagctcttatcgaaataaacagggtcgtttctccactcatgtggcagttgagggccgatcatacaaacatcgccctcgaaatatccttccacatgatccccgacaaagcgagtacccgtaccacttgtgatatacattatctcaatagccggatggtagtgccaaggcactataaaatgcggtagatcctccacatagaaatgaatgtgactatctatcgggaatggcagttcttgaaataatggtttcataggctttatactaaaggtttcaacctctcgatcagttcatccccaagcgcccgtttattcacgatatgttcctgtacggcggtaacaaacggattattcacgaaatctcctcgaacaccctcgaaatcctgttgtttttccttgttggaaccatccacaccgaaaccgatcatagaagtcaaggagaattccttacgggcatcctcataaagcatctcatccaagcggatcacacattcttgccaacgacgaaccagatcaataatctctgcggcggaaatcgaacggagatccaccccataataacgttcgatcatctcgtaggcccatgtccattccaaggaataataacgtccgtgaaccaaacggaaaaaacattccacatcctctaaggaagcgatttccccctgttcgatatcttgcaacaaggcatctagcggttccctcgggaggatcaagcccgccaagtccagccattctccggagcctttggattccgtaggacgcaattgctcccagacctcttccatagaacaataggtcgtaccttccaaacgcttgattaacgagttaccaaagaacttattaattgccatcccataaaagttcaacgcattccggagggaggaaccttttatacgagtattctgataataataaatctcggaagtctctccaaccaatgcctgcaggtttttcaagatatccaccgctttcagcatcttctggatcgtatagggactcaatagattatagttaatcatatccaagcgatccgggtccgtacgtttatcacgcttcggccatttctgggcatcacggatcgtacctacgctgcgaagattaattcccgggactaagtaagtctcatcatccttctctattaaataggagaagggaatatcggaagtatcgctatggtgatgatggcgacccattaccaaagagaaagcgccgatacgggccggccaaagaatatacgagtcgctggtagtcttggagccacgttccacgatcccttgatggatcggtcccagcttatacatatgattactctggttagagccacttcccgcgttcaagaacgaatacattcccgctatcaacaaactactcttatgcatagacaccgtaaacggaccggcgaatatagcgcaagcctccccattctcgaaagcgcagttgctgaacaacaaggaatcatgggccgagaagttatgcgtcacttggcaagcctgtccgataaagcaacggataatcttagcggcatccgcgatcttggctcccgaagagacaatgaaatcttgcgcgatcacactatccccgataaataccggggcctctctcttactatttacggaaccattttccagacgtgcgctattctctatggtcgcgtaatcaccaatcttcacgttacggatcgtaccggtattgacaatcttgaccttatcgccaaccgttccctccgtagaggcgataccctccgtataagcggtaatcatatcccgcaagcgttcgatcaaggccgaacgatgacggtacaatgcgataatataagccaatgaagccgacaggccatcgtaaatcggaacctcacgcccgccggtctcattcaagaccgacacctcgacattattcccgaacgtagccttgccttccaccaacataacatttatattctggataaagcagtcatcaccgatctggtaattagcgatataattctgtacgttctcgatcagcacattatcccccaacgtacaattatgtagggtaacatgacgaagcccgctatgctttaccaatcctcccggtagggtaaacgctttacgaaaggctcctaacttaaccactcccgaaaaacgcacgtggttcacatattcaatatcaaacacctctggaacccaaacttgattccaatcatcggcccggcaagcctgagatcgcaaggtggcgatctcatccggccgcaaatttctcaaatgattcattggtactaattttgtaagactctactcttcatcatattgctgaaagaggaagtcattgtaggggaaacgggtgatatggatttgtttaacccgttcatacaacatctctttcaacgcctctatattcgtacgttccttggcggagataaagatgcaattatcttgcaattttcccatccacgtacgtttcagttcatccagatcgatattctcacgaccacgaggggtcaaatcatcttcctctttcgggacaaaggtaaatgcatccaccttattgaaaaccatgatcatcggtttctcggtcttatcgatctccgccaacgtacggttcacgacctctatttgctcttcaaaagtcgggtgtgagatatccacgatatgtaccagcaaatccgcctcccgtacctcatccaaggtagatttaaaagattccaccagctcggtcggtaacttgcggataaatccgaccgtatcggacagcaagaacggcaagttctcgataatgaccttgcgtacggtcgtatccaacgtagcgaacaacttattctcggcaaagacctcactcttgctcaataagttcatcaaggtagatttacctacgttcgtatatccgaccaacgctacacgtaccatcttaccccggtttttccgttgtacgcttttttgcttgtcaatatccaccagctctttcttcaatcgtgcgatcttatccaagataatacgtttatcagtctccaactgtgtctcacccggaccacgcatacctacgccgcctcgctgacgctccaagtgcgtccacagacgagtcaagcggggtaacatatatttatattgtgcaagctccacctgtgtcttcgcatgggcggtctgtgcacggctagcgaagatatccaagatcaagctcgtacgatccaagattttcacctgcaattctttctcaatattacggagttgcttcggactcagctcatcatcaaagatcaccaagccgatctcattctctaccacatactccttaatttcctgcaatttaccggtcccgacaaaagtgacggaattcgggtaatccattttctgggtaaaacgctttaccgcatccacccctgccgtatcggccaagaaagccaattcgtccagatattccttaaccttttgctcattttgctcgggggtaaccaaacccaccaaaacggccttttcggtctgtgcctcagatatgataaattctttcatgccacaaagatatattatttcaattatttacgtatatttgcgaacatatttacaaatataaatcaacttagctatgaaaaagagaatttggcatctatccagatgcgttgtcgtttgtacggcattcctattcgtacaacaatttatccagtcacaagtttcaaatccatctacatgggaaagttttgtgcaaagtaacgcaaatatatctatccgggatacgtttcggatgcagacatttgagggacttgcttctgataattgggattatgccattacaggtgaagcccttattgaagatatctccggcgtgaaagatattcctaacagccacggaaactacgggttacgaatgccaatgaatacgcaagtggctttcgagcatttcacgttaacaaatcatcaagatataaaaatcagtatacggaaagggggcatccttctagtagaaggagaaggcatgagagccagaacctatcgaaaaggggaaacaagttatccctccttagttccaaccataggagagagtggcatcaatcctttcaaaaccacagatataaaaaacaatcctccgggcttagatcttatcgtccccacaccggccgccaataccaaaaacggctattattatgtagacagcgtttacgcacacggcatgattcctacctattccctatttaccggaaacagcgattggaaccatgaggatcactggagccatctacccacctaccgtcaccgcaacgccttgattaacggtaatatctccataaatacaaatatcagctgtaaagatatctttattggcaatggaaatatccatattttaccaaccggaaatctatccgcaaataaccttactatctatccaaatgatggtaccttggcgtcttcctccaccttgcgatcgtccggaactattaacatctccggcaaaataacgatcgagaggaccttcgctcaaaaaggcaaatggtattttatctccttccccttcgatgtattcgcttccggcatagacccggatttccaactgggtgatgacaaaagcgatacaaacggtaactacttttacgtacaaacctataacggagaaaagcgagccaactcacaaagcccttccaacaactgggaagtcataccacaaacaataatcaatacatcccagcccatcttcaagaagaacaaggggtacctgatcgctattgacgcttccgccgatcgtcagaaccttcgtttctcctcgaaagcaaaagatatccctatagatttcggaaaaaacggtcaagcctctattccggtaagcattaacaaccaaagccagaaccagaatcacaacggctggtatctatgcggtaatcctctgccggctcctttatctcttagtcaaatagaatcaaactcagccttagacggatacatttatatatatgacggctccacctaccaaccctacgtgatcggtagcgatttcgccatccctccattctccgctttctttgtcaaagcgaataaaagtaccagcctatctgtatataatacatccgaaccagccaattataaattattatcaacgaatgcacccatatctttcccaacatcggaacctcaagcccgacaagatcctcctgtttccaatcaagccttttcatttccggaattaagctatcagctagagaacaaaactttattcattaataatcttccatcccccggtaaagtcaaactacttactccggcaggcatattggtatttacgcaagcggtacaggcagggaaccctatcctcccgattcccctcccacaaggtttatatatcttaattattcaaacagaacattatcgggcacagtacaaatgcgttttaacctcctaaagcccgaaacaatcttatatctttgccctgttttaagaataaaacgaatatgaagaagatcaacatcacaacaattgccttacttgtctacttaatcgtaatgagtatcatcggctggccaggaaacaattcggggaataattataccgaatatttcttgatgatcggcgctacgctcgtcatcatcatccttctacgctatctgcaagtcaaacgtctgagaatgcgagataagtggaataaagacgaagatcctgccaagcaataaaaacacagcctgtttttcttcacagaagaacaggctgaatgaactttattttattacactagtattaatattactgctttttcgccctcacaggctacttgaatgtctcgtaaagactacgcacagtataaattattcgattataaataagtacaatcttaacaggacacacacaccacttgtttcgcttactttcttaaaatgagttactttcataattcttacattttattcactagtactaaaacgtcattaaccaatacgcaaaagacaaccgacatcatttttgtaatcgtagcctaatcgtcatatcactgaaaggcaatacaatcgtgaacacatttttaataacatagacatatcatcgtaatacaatcacacgtcctttgcgttctgaaaaaatagattaattctaatatattttaaggacaaaaggatggacaacagaaattactttacgatggcgattcccgctcttttgctaggcgtagcatacttacagccaatcaatgcggcaccagcggaggatctgccaaacgttactggacgaatgacgatcacccaacagacattcacggtaagtggcgtagtcaccgatacgaacggagaaccaattatcggggctaacgtgattgagaaagggactacaaatggagccgtaaccgattttgacggcaaattttctctctcgctgcaaaacaagcaaagcatattggtcgttacttatatcggttataacaccaaggagattccagccgggaatggttctcccctcacgatccaattgcaggatgacacccagaacctagacgaggttatcgtggtaggttatagtgtacagaagaaaaaagaccttaccggtgctgtttccgtactggaggtaggcgacctgaaagataccccggtatccagtgtagatcaaatgatgcaaggtaaattgtccggcgtaaacgtaatcccggataatatgcccggcggaggcgtagcggtacgtgtacgcggtttcagcacgatccgtaacaatgatccgctttatatcatcgatggcgtaccagtagagggcggcatcaattttctcaacccgaatgatatcgaaagtatgcaggtattgaaagatgcttcttccgcttccatctatggtgcacgtgcggcaaacggcgtggttatcatcagtacaaaaaaagggaaggaaggtactttccgggtaaacctagacgcttacgtgggagtacaaacctcggcaaaacagatgcgtatgctaaacgcccaagaatatggcgacttattatggcaggcacagcgtaacgacgggaaatcaccagtaagcgacgtgtatggctccggcgagaccgccgtaattccggaattccttgacgcagatcaccgtcttccctcgggagacgtggattgggttgacgagatcatgcaaaaagccatggtccagtcctataacctctctctggcgaaagcagataaagttagcagccacttgttctccctaggctatttcaaccaagacggtcttatgaaatatactggtttcgaacgtatatccggacgtttcaacaatgagttcaagctcttcaacgatcgtttgaaaatcggtgagaacgccacattatcacatgcgtggggaacctcggtcaccaataacgccgcactgggaggtatgttatacaacgcctataagaccgtatccattacccctgtttacgatctggacgggaatttcggcagcaacccgatcgccgacatctccaacccgttaggcgaattataccgtaataaggataataaagatcgtaccacccgtctattcggtaatctattcgccgaactgaatatcctagagggactttatttcaagaccaacttcggagcggattataaaaacctgtataaacgaagcttcaaggccaaatacaacgaattgaacacccagcaacccttgagtacgttgagcacgcaaaaccgttggaacttcaattgggtattcacgaacacgttaaactatttacggacattcgataaacatacgatcggagccttattaggtatcgagacaaaccgttatcaagaggaatacttctccgcctcccgtgaaggctttgcctcggatgacgataacttccatttcctcgatgcgggcgatagtggctcccagaagaacgcaggttctgcctttacttccaagatgatgtcttatttcggtaaaattgattataatttcgacaaccgctacttattcgcagccacgttccgacgtgacggatcttctaaacttggtaacaataaatggggtaatttcccggctgtctccgcaggctggcgtatcagtagcgaaccgttttatgatattccggctatcagcaacatgaaagtccgcataggttggggacaaaacggcaactctgatatcccggcttattccacgatcgattcttacatgagtaatccgaaccactccaactatccgatcgacggtagccaaagttccgtgacaaccggatacacccaaacccgttacggtaacgcaaacttgaaatgggagaccaccacgcaaactaatgtcgggctggatctaggcttcctagataacagcctaaccgttgtgctggattggtttaacaaagataccaaggacttattatgggagcgtcccttgatcggtaccgtggggggtacaaaccaaacggtatgggacaatgtcgggaaaatgcgtaaccggggtttcgaagctgaggtcagctacaataagagcatcaataaagatttcgggttcaatgtcgccttcaatatgtccgctatcaagaacaagatgacggaattagacggtgatgtctcctatatcggactgcctaccagtgtgattcactccctcaacttcgatcaagaggtttctcgttccgccatcggtcaaccaatcggctctttctacgcttataaagaagacggtttattccagagcgaggcggagatcaaatcatataccaataataaaggcgaactactccaacctaacgcaaaaccgggtgatatcaagttcgtagacgtaaacggagatggcgtaatagacggtaacgaccgtgactatatcggtaacccgctccccgatgtcacagcaggccttacattaggagtcaacttccataattttgacctcagtctattctttcagggaatgttcggaaacgatgtatacgacttgacccgttatgtgggtgatttctacaatcaatcgcaatacaacaaaaacagccgtgtcgttaatgcatggacaccaaccaacacgaatacggacataccccgtgtcaccatggacgatccgaacaataacatccggccctcgtcttactatgtgcaagacgcttctttcgttcgcttaaagaacatgaaaatcggttattccgtacctcagtccatcctatccaagattaagttcaatagcttgtatatctatgcgcaagcaaccaacttattcacgatcacaggatacgacggtatcgatccggaagtgggattgcaaagttactccagtgactaccgtaacctagatatgggtgtggaccgcggcatctatccgttatcccgcaccttcacctttggagtaaacgtaagtttttaatcatcaaacaacaacaaactagaatatgaagaaaatgattatagcggcctgtgccgtattcgcattgacatcatgcagcgattttctggaagagacacctgtaggcgaactgactcccgaacaagcacaagatcccaataacatcgagggattgattatctccgcctattccatcctagacggccagatggacgatgccagctccggcttgaattcaggatgctccaactggcaatttggcgatgtgatctcagacgatacctacaaaggcggaggtggtacgggagaccagaacccggttcacttgatggaaatcttccatatcgacccgactatccaagattacaatcggaaatggctagccttatacgagggcgtgaaccgctgtaaccaagcgatccgtatcctcaaaggcagcgattatgataaaaaggagacccgtatcgccgagatgcgtttcctgcgtgcccatttctatttcaacttaaagatcatctataaccagatcccatatttcgacgagagtgtcagcgatccttccgcgttcgcctctatctcgaataaggagtatacatccgatcaattatgggagaagatactgaatgattttaaggccgcctacgaaggtctcccggattcccagccggatgtggcacgtccatgtaagatgacggcccgggcttatatggctaaagtttacttgttccaaggcaaatggcaggaatgcgctacagcgacggatgaggtgatcaattccggcaaataccagctactccccgacttccggaatatcttcttgccggaaaatgacaactgccctgaaattttattttcagtccaagcctctatcaacgatggctccccgaacaactacaacggaaatccgggcgaccgtttgttacctccgggaggcccttatcccaactatggtttccttcgtccttcccaaaacctagtaaacgcttataagaccgactccaacggcttgcctttggaagacggcatagacgtttcggaaaatgattatgtagacacccgcctagaccacacggtagcccgccccggaatcatgttcctagatgtccaactctatgactggactcctcgtgaggctacggtttacggtccgtatagccctaaaaaacgtattgtctccaagaactcaagttactatttggctatctggccatacgtaaacgcattgaatgtttatattattcgatatgcggacgtgttattgtggcgtgccgaagctgctatcgaactaggcgatttgactaccggattgaaatacatcaaccaagttcgcgagcgtgccatgaacagccagaccgtaaaaaccgctgacgggacatcggatgccgccaaataccggatcggattatatccgtcattttccgacaaagaggaggcgatccgagccttacgtaccgaacgacgtctggaattcgccttagaaggtgaacgtttctttgatctagtccgttggggaatcgcctcagacgtgatgaacacttatttcgagcatgagaagacattccgctctcatctccaaaatgcccgtttcatcaaagggacccacgaatacggcccgataccgcaagcggttatagaccttgcgaaaaatggaatcatcgagcaaaacccaggatattaatggaaatgctcccattcctcttaaaagaaatagctcctatccgaatattcgggcaggagctatttacatttgtctttttatatcgtctccttataacttatcccttaaaaaccttccggtataggatgcctcgcaagccgcgatctcctccggtgtaccggcacaaaccaactgcccgccggcctttccgccttccggtcctaaatcgatcacataatccgcacatttgatcacatccatattatgctcgataattaccacggagtgacctttctcgatcaaggcattgaaagctttcaacaaagtcttgatatcatgaaaatgtaaaccggtcgtaggctcgtcgaaaacgaacaaggtaggttgctgcttctcttggcctaagtaataagccagtttcacacgttggttctcaccaccggataaagtggaggaagtctgtcccagcttgatatagcccaaacctacgtcttgcagcggtttcaagcgtttcacgatcttcttctcttgggagccggaacctttctcgaagaactcgatcgcttgattcacggtcatttccaacacatcgtatatgttagcgccttgatactctacatccaatacatcctgcttgaagcgtttgccgtggcaagcctcgcattccaaggtgatatccgccataaactgcatctctaccgtgatcttgccctcgcccttacattcctcgcagcgacctccttctttattaaaggagaaataggcggcgttatatcccatctgtttcgctaggggctgctcgccgaatagtttacggatctcatcgtaagcgccgatatacgtcacagggttcgagcgagaactctttccgatcgagttctggtctacaaactcgatcgcctgaatcatattcaaatcaccactgataccggagcaatccacggtcaggcgggcggcatcatccaaatgacgtttcacgccctcgtagaagatatcacgaaccaaggagcttttacccgaaccgctcacaccggtaaccaccgtcatcacgttcaaaggaaacttcacgtccacaccctttaagttattcttccgagcccctgtcacttctatataattattccacggacgccgataaggcgggatctcgatctgatcctctcccgtcaaataacgtaccgtatggctatcggtacatttccggaggttattcacatcgccttgataaacgacctcgccccccaaacgccctgctttcggaccgatatcgatgatataatccgccgcacggataatctcctcatcatgctccaccacgaccacggtattccccaaggcttgcaactgtcgcaataccttgatcaacaaatccgtatcccgggaatgcagaccgatactcggctcatccaaaatatacaacgaacccaccaagctactacccaacgaggtagccaaattgatacgttggctctctcctccggataaagaggccgagaggcgatctaaagccagataacccaaccccacatccaacaggaattgcaagcgattattgatttccgtgagcaaacgtttagcgatcgccgcatccgtctcgtccagttccagttgatcaaagaaagcctttgcctccgaaaccggcatcgtcaccagctcggcgatattcttaccacccacttgcacatacagcgcttccggcctcaagcggctccccttacaaaccgggcaagtcgtctttccccgatagcgggcttgcatcaccctgtattgtatcttataaagattctcttccacgaacttaaaaaaatcgtcgatgccgtgtaaacctctcgccccatgccacaacaaatctttctctttctgtgtcaagtcgtaatacggacggtggatcggaaagttatatttctcgctcttcacgataaagtctttcagccattcccccatcacctcacctttccagcaaaccacggctccttggtagacagacaagcttttatcgggcaccaccagattctcatcgatgcccagcaccttaccgaatccctcacaggtcggacatgcgcccaacggattattaaagctaaacatcatatcggtaggctcctcgaatatcatgccatccgcctcgaacttcttcgagaattccttcacgactaccccttcctccgtataaatacgaatcaaacaggtaccatggccctcaaagaaagcggtctcggccgaatccgccaaacggcttttcaaggtcttatcgtccgataccgtcaggcggtccaccaacaactcgatcgggtaagacagcaactcctcgctcgccagtacctccgagatacgatataccgtatcatttaccgacagacgggcatatccttctttccgcaagatctccagctgctccttcatatcccggccttccggcaagacaaccggagcgaatacggcaaaacgagttccttcgggatatcgcatgacctccttgataatatcgctcacctgatgttttttcacctcggtgccggaaaccggcgatatcgtctttccgacgcgagcatataacaagcgtaaatactcataaatctcggtagatgtaccgaccgtggaacgcggattacgggtattcaccttctgctcgatagcgatagccggcggtattcccttaatatagtcgcattccggcttactcatcctccccaagaactggcgggcgtaagcggataaactctctacataccgacgctgtccctccgcataaagggtatcgaacgccaacgatgattttccactccccgacagcccggttatcaccaccagcttgtccctcggaatctctacatctatatttttcaagttgttgacacgtgcccccttgatgaaaatcgaattgctctcagacatattacctttatctttttctttaacgcaaagatagccaaaactaaccgattctgccctatcttcatcgaactaattcacacagttagacagggtgtgcctcgtctctactgccaagtaaataaaataacaagggtgaaatatttcatatttacagggaatcttctacatttgttgaaaatttcatagacaaacacagcaaggcacccatgtacattaaatattttcgcttcttagtagcgattctcttttgtgcgataacctcatgttctacggttcgcgagaagcctcgtccggctacgagtacgggcaaggaggccaagcgagagtttaggggagcatggatacagaccgcttttcaaggcgaatacaaggatatgactcccgcccggatgaaaaaagacttcatccgcaagcttaattacctgcaagcatgcggcatcaacgccatcatctttcaggtgcgccccgaggcggacgctttctataaatccgatatcgagccgtggagccgcttcttcaccggagagcaaggcgtagccccggcaggtgagttcgacccgatggccttcctgatccaagaatgccataaacggaacatggagtttcacgcttggttgaatccttaccgggcgagcacggcgggaaacacccgtttcgccgattcccacatctatcataagcatcccgaatggtttgtcacctataataaacaaatccttttcgacccgggattgccggaaagccgtcagtttatctgccgggtagtgcgtgatatcgtcggccgttacgacgtggacgctatccatatggacgattatttctatccctatcccgcagcgggtatgcctttcccggatgataacagcttccggaaatacggcttgcgaaaaggatacagcgaggcgcaaaggaacgattggcgccgggagaacgtgaataccctgatccgggaattgaaacgtaccatcctgctcaccaagccttgggtacgcttcggtatcagtcccttcggcatctaccgcaacaagaaaagcaccgcagacggatcgggtagcaataccaacggtctgcaaaactacgacgacctctacgccgatatcacctattgggtacagcaaggttggatcgattataacatcccccagatctattgggagatcggacacccggcagcagattacatcacgcttatcaaatggtgggacaaaaacgccaacggaggtcatttatatatcgggcaagacgtggcccgcaccatgaaagcggaccaattaacccgcaagatgcgttacgagcgtgccttgcctcacgtgagcggcaattgtttctggcccgccaatgagattctatggaacaacaagggcgtagccgacagcctgaaacggaactaccaccgttacccggcccttatcccggcctatacccatatgcataaccgtccgccaaaagacgtaagcaagctaaagaccgaatggacacctaaaggcttcttgttacattggcaagcggagcaaagccccacgaatccggagctagcctcctatttcgtggtctatcgctttaacgacaaggagccgatagacacgagcgatccctcgaagatcgtggctatcacccgggaaaccggctacttgatgccttacgagaaaggtaaggtaaaatatcgctatgtagtgaccgccgtagatcgctttcacaacgagagcgagggcaagacaaagaaagtaaaattataaagacaccaattatgttaaccgaccatcgctgcaccaaatataccgactgttcctcttgtagtttctaccagagggacatattcaagtatcgtctttatccgaaagggtacgtgatccctcagacaagatgcatgcagaacatggtctttttcctagtcaagggagagatctggctgaacagcgaggagcacccggacaccacgttccggggcggacagttcgtattgcaaccgatcggctcgaaagtggagtgcaaggtactcgactacaccgaatgtatcatctatctcttcgagcgtccgcaaaacatatgcgacaatcgtttcaacaaaggcatctccatcgtggagaacgaacgccagcagcccatcgtaatgacgatggtcccgccgatacaactcttcatcgagggcatgaagctttacctcaacgatgatttaagatgctccggactgatgcaagccaaacgctcggagatggtctacttgctgaactgctactaccccatcaaggagctagccgccttttacgccccgatttaccggtatagccacagtttccagtatttcgtgatgcagaactaccagaaggcgaaagacgtggagaccttcgcccaattgggaggctacagcgtacccaccttccgccgtatcttcaaggatacgtttggagagcccgcttatcaatggatgctgaaacgcaaatgccaagacattcataacgaccttatcatgacagagctttccatatccgagatttgctacaagtatggctttgaatcgctttctaacttctcgcacttctgcagggctaatttcggccaatctccccgctctgtccgttctctaaaggatgaaaatacataatattcaatgattttttttaaatctctcaacttttgcaactctttggacaaaaataacaattctcccctttagcattccctatacatttgcgtccagaagatcaatcataattgattttcaaagataaataaaatgtataggtacaataagacaagtattatcttaaagatctctatcgcagttttattcattatcggcatggtgctggaatgtagttgcgagagatccgaggaaccggagaaaagaggcacgggctacatcacttgcacccttcgttgggatagcgtggtagcaggttccccggtaccggagaaacttcgctattgtatctacccgtcggagggcgggccgatgatacagacggatgggaacgccaatggcatcaccctgttcttaccaccggataaatataatgtattggttttcaattacgacgcgaaaaacataggttttcgtaatatgtcgaagttcgaggaagcggaagcatatatctcctctctagaggatctggaggcatgtcaagacgaggtgatcccgttatatgtcgccacgatccgttcggtagaggttgagggggacacggagaagcataaggaattgaccttgtcgccgtttttcctatcgaaggacagttccttgaatctaagcaatgaaaggaaagggatcgcaaacaatatcaacgggctaaagaaaacgagtatccgatgagagagagccggttatttatcatcttgatctcgcttgtcatgggattggcgggatgctcgaaagagactatgatcggcgagtatgtagaccgttgcgcggtgcgcctcgacatagattggggtccttgcggtatcgacccggatggtatgaccgcgctcttttacccggtcgatggaggggagccaagccgtttccttaccaacacggtgacgggcgacgaggtgcgattgaggaaagggatctataacgtagtggtatttaaccaagcggccgaagaatacagttatctcacgatcgaaggtcaagatcaatacagcaccctgcggatcgtgatgaagacgacggatagcgattggtacacgcccaccgagggagagcggctgatctacgatccggaacctttagcggtagctacattggagggttttgaggtgacgcaagagatggtacgggcgaaccttaaggagggaaaggagttttccttggcttgccggcccgagaaggtaatcttcacgacccatctgtccttagagataaaaggattgcacaacatgcggactgcgaggggatcgattaaagggatggcggatacatattggatagcggatagaaagaccggaagtagcgtagcgacgcaactcgtggacttctcggaaaagacctttcacgagaactcaacgaccgatggtatcttatccggctcttacttgacactcggcagaccaaacgtcacatcgaaggccacggacgagatcagtaatttgcttacgctctccatcttattggtcgataacagaacggtcattacgaagcaatatgatatagctccacgtgccgcgatcaataatgagacgaaagaggtagaggtggtgctgggtacgaaaattgatccggataaggaagaagttcccgaggatattccgttggagctaccaaacgtggagccggaaaagaatggcggcgaagggggattcgacgcgactgtagacaattggggagatgagacgaatatcgtaatccccgcatagatatagaatgataaaatagtaacaatataaaacaacattaaaagactaagcgttatgaagacaaatttattcattgcagcattaagcctagtagtattggctggctgctcaagcgaagatgaaattgatacattagtgtctaagagtgataatgcgattactttcgggacttatgtggggaaacagacaaaggctatagagaaatcagcatttgcagagaatgatcaatttggggtatttgcattctatacgaaagctgaggggtataacaatactaaagatactcctaatttcatgtatgaacaatccattaaaaaaggcgcaggagaagcagaatggacatacagccctgtaaaatattggcctaatacaaatggagagcaaatcacattttttgcatactaccctgccggaaagactggtatgacattccaaacaacagaaacatcaacggcatatagcaatagctcaaaaggtttccccgatatcaaatttgaggttcaagataaagccgatgagcaagttgactttatgtattcaactctagtgaaccaaacaaaaccagaaactaatgcggcgatcaaattcagctttgctcatgccctatcgaaagttaatattaaggctcaaatgaaagaaactctaaatagcgaaacaactgtaaatataaaaagcatcgctttaaataatatatacaacacaaacacattaaaatatacaggatcaactcctagctggggatgggatactgcgagcaatggacagaagtatgaaataactcccactaatattagtttagcctctgatgggacgactgctattgatatcacaagtttcttgatggttccccaaacattatcaacggaagatggcaaaaaagctagtattactatcacctatgatgttgttacaactgacactagtcttccagaagggagtagtactattacaaacacgataactacagatataacttctacaacagaatggaagatgaatcaacaatatgtatatactatacagatttccttaactgatgtaagcgtaagcactgaagtttcaggttggacagaaccaacagagtaaaacttaatatgatttgcttaagatatgctataagccgggagaaaaattcccggcttatattttatatagacttctaagacattcaaaagcaactataagaagagttccacaataagacaaaccacaaagaccttcctgccactcaaacaaacgataatctatctttttgcccaatataagccacatatcgtaacaatcccttccccccacaatcacgaaacaacaccaaaggcatccccataaaccgccttttacccctcgaaagccccccttttcacacacaataggtcgcgaaagccaacgcgaaaggccgcgttaggcgacacatatggttacgttgggcatcgtaagcagctaagaatagggttataacctaatgagaaaggcgttataaccttattataaccctatcgtaaccttatggaatagcccaaacacccggcaaaccatgagttacgatgaattaatttcgctagaataaaaggccattttccaacatctgtctgtctactaaacaattgctgtttttttcttgcgtatttggaagcgagacgtacatccgcccgaaataatcgactctcacggacttccgtttacattttgtcaaaatgtcaatccgcgaggaaacttctccccacatagcatacggatatcaattattcttcctatatttgcgataatccctcatatctaagcgtaggtcactgaaggaggacataagttaacgaagagcgtttaaagatattatcccgcattgaaatctcgacaatttcaactcccggggataatagacaagaaacgctcacgtcagtgctatatttaccagtaattgctctggacgatataacagcatggcgtgggctattgtttattattcgggagtgggcagtcgagagcctcaatgcggtaatatcaatagtttccacgcttctgtatttttagcccggcaaccgatggagacaggttgcccttatccattaaatgaagacgatcctcctgttacccgtcttgtcgctatggctcctgcttgccacgcaagccaatgcccaagtctatcacctacatttatccgacaacacttgccggataacagaatgcgttgatactccacaaggcgtcaagcccttgggtcagacatggaaaggaaacaccttccatgatcgtttcacgctagatttcgatcgcactatcttcaggtgggaaaaggaaggaaaagagacgtatgccaacaagatcatcaaccacactgccaaatacgctcaccactcattcaccacggagcagattaccgccaacctcaccatcaacagccatcgagccgtccttcaacttatccactttcagaatggccaatggatacaagtcacttatttttgcgagatagggaattaacggctcatgcgaacatctacaacatctaccacttatacttgatatttgtactttttatttgtgagtgaaaattccagccttaaaaaaggaggccttaaagtttacgataaacatcttcaaaaggtactctgcaacgttctccccaaatgcctttatttccatcccgtatcccacaagaaatagccatgtttatttcagcaccatgaggtagtttcaatgtcctttttagccgacggctgtccagcccttctaaggggcacgtgtcatagccttcgtttgccatcgcaatcataaacgtttgtgcggcaagcgcacaggatttatgggctgtcacacgtatgtcattctcggaaacttcaagcatcataggacggaaaatactgattatattagccaacaatttcctgagcaatccgagaataccgaaaaaccgggcataaacaaagggcatcaatataccgtaatatatttcccgatccttaatacgtttggcctgacgttctttaggactgtaatgacgaatgttctcccgttcaaaattgagtacgaatcgcgcatgtttcttgtaccagtcacgccgaaccacaaaaatgacaatttgtgaagcggtagaagccgctttctgaccaaggcagtcccttgaaatttttgccaataattcaggttctgtaatatggtaaaattcccataattgcatatcagaactgttaggagccaatgtagccagttccaaacaatgttttaccttttccgtatctattggtttttctttatcatacacccgtacagaacgacgatgatgaaggacttcatctaaattcataatgatactgatttgaattaaacatttattcccagctgattacttcagccatttattattgtgctttatttaattgccgcataacgaccttcgccatttctttagaactgaacgggtcctgcccagtaatcagattattatctacaactatttttgaagtcataggtatcaatgctttttcataatccgctcctctctctttcaacaacgcttcaagatcaaaaggcacgtcttcttttcttctggcaagactttcctcaaaccaactgaatcccgtcagctttttgcctttaatcatatattcgccattggatagtttgacattcaacaacccactgaccccgtggcagatggccgacactatcctcccactttcatcctgtttccttacgatagtctttaaagcttcattgtcaggaaagtcatacatcgcaccgtgtccgccggctaaatagacacaaccaaactgttgttccaacaggttatccaaactgtttgcatgatccaacagctttttgaattctggcttttcccaatacttttcggacatttcatctaaaaaaattggttttaaactttcgggatcaatgggagtataacctcctttcggattggctaccgttatgtcatagccgctttcttttgcactatgatagatatgagtaaactcactaagccataatccggtcgcgagtttcccattggcaaaagtccctgtgctagtaactattattaaaatcttcatgataatcaaattattgattcatattctttaaaagaaaacatacacatggatagattgtttttcagaatatggaatctttaacataatccgaaaatatgaaaacctgcagatcctttcaaatgctatctctatccaccagcattcgataaggagaaattaccgatccctttcctattacctccgggaggaagcaatttgatgaatatcgtttccatgatgcccaagttgaaagaagaattaagaactattttcaacgactatggcttgaaatatgtcttcgataccaatagccaggagattaaagtaatgaaagaaaagaaaccgggagagatatttttaattccatttcattccatagccgataccctgcagcgtatgattttctacaaagcggctattgaaagtaacagtgagtccgcattagtttttgaagaaccggaagcccactcataccctcctttcatatcaaaggtaacgcaggatattatccaatcggacagaaaccagttttttataacgacacacagtccttatgtggttaacgactttctggaattaccgagtgaccaacttgccatttacctagttgacttcaggaatggggaaactttcgtgaaaagagccagtgacacagaagtacaagaaatgtacgaatatggcatcgacctatttttcaacactgaaacatagcgaaagatacagaacacattgcaggcacaagcccatacccaagtctaccgcctacgcttattcgacagtacttacaggataacggaatgcgttaaaaaccattttacggaatgtccaaatgttctgtcaatacgtttacgaatgttcgtaatggcgcaccttcataattatccaactccccaaccaagatcaacgcggcgttcttcatccatgggtggtatggaatggatagttcataggggatttcccggatcagttccggggtgttcttgattaccgtataagcgtcgccatcggcggctttcttgccttcgaaaactaaggtacggtcgtacattttttgcttgtttgccccgtttagtactaccggggccatgactacggaatctctgtcgctactcaacatcggcatcaaggacagggtttgatatcgtcccacggagagtccgcagacactgatcgttaggtctagacgcaaggagttgccctcccgctcgatgcggttttgcttcacggagacttgcccccggtaagattgtataggcacctgcgctcctgccggaagaacaaggccgatcacaagcaagcatatatacaagcatatataaatgaatgtcttcatagatttatctctttatttgatgatgtaaacgatactgatacccgcctttgttaatccccaatactcgttgcggaacttgccgataggcgcatctcctctaggaaaagcgtacttatcatattcgaaatgcaaagttactacaaaaaagtgaaatgcggaaagatatagtgatagaattgagttacaagggttttggttgaagtggcgataatccgtgaagccattacaatccctgccgaagccaaatcctgacgccgctacgttacttgttcgtaaccatgcccgaaaatgcgacaaacgggtacgaatagcgaaacaaggctctaaggaatagtgagttatccataactcatgcgaaaaatcaggttacggaaaaagattgcgccgttcctccccgttttgcgtaccaacaccggactcttcaccaactaattttgaaacccaaaaattaaggacaatgaagagtacattttcagtaatctactacctcaagcgtcaggtagtgaaaaaggacgggacagttcccgtcatgggacgcatcacggtggacggcagccagacacagttcagctgcaaactgactgtcgatccgaaactgtgggacaccaaaggtggacgtgtcacgggcagaagcacggcggcactcgaaacgaaccgtatgcttgacaagatgcgggtacgcatcaacaggcattatcaggaaatcatggagcgtgacaacttcgtcacggcggagaaggtgaagaacgcctttctcggactggaacaccgctaccacacgctgatgcaggtgttccgccagcacaacgaggactacgagaagcaggtggaggcaggcatgaaagccaaaggcacgctgctgaagtaccgcaccgtttacaagcacatgcaagagttcctcgacatccgctaccatgtgaaggacatcgccctaaaagagcttaccccggctttcatctccgacttcgagatgttcctgcgcacggacaagcactgctgcaccaataccgtgtggctgtacgtctgcccgttacggacgatggtattcatcgccatcaacaacgagtggctgacgcgcgacccgttccgcgagtatgaaatcaagaaggaggaaacaacacgcagtttcctgaccaaagatgagatccgcctgctgatggaggggaaactgaaaaacgccaaacaggaattgtaccgcgacctctacctgttctgcgccttcacggggctgtcgttcgcggatatgcgcaaccttacggaagagaatatccgcacctacttcgacgaacacgagtggataaacatcaaccgccagaaaacgggcgtggtgtccaacatccgcctgctcgacatcgccaaccgcataatcggcaaataccggggactgtgcggggacggcaggatatttcccgttccgcattataacacgtgccttgccggtatccgtgccgtcgccaagcgttgcggcatcaccaagcatatcacgtggcatcagagccgccacacggcagccacgacgatattcctctccaacggtgttcccatcgaaacggtcagctccatgctcggacacaagagcataaagacgacgcagatttacgcaaagataaccaaagagaagctcaatcaggacatggagaaccttgccgcaagattgaacggcgtcgaggaatttgcaggttgcaccatctaaaaagaaaagccatgaaacgtgacacaatcatcatcgaggacaaggcagtcagcgtaaccggtaacgacgtgtggatgaccgccaccgaaatagccggattgttccatacgaccgtcccggcagtgaacgccgccatcagagccgtccgcaagtcggacgtgctgaacgactacgaggtgtgccgctacatgcagcttgaaaacgggctgcacgcggacgtgtacgcccttgaaatcatcatcccggtcgctttcagggtgaatacctacaacacccacctgttccgcacatggctggtgggaaaggcactctcacaagagaaacggcagacatacgtgatgttcatacagaacggaaaagccgggtattgctgattgcacataccccataagacaagtaaacgggtagcaccacaaaaggtgtcacccgtttactttttcatgaaaccgcctcactccagcggcttgcggtagttcgcttccagtaccccgcgcagccccgtttccgggtaaagcaccttccctcccaaaagtatgaagggcaacacgcggttgttgcggtattcctgcaaggtgcgccggctcacacggagcagttccgacacctcgccgtccgtcaggtaacgttccccgtccagcggaggacggtagctttccagaaatgcggacagccatttcgagcctttgcgcatatcctgcaccacagaggctatcggctcgtcttccatcgtaaaaacatcgttgttctcgttcatcataacttcggattcagtgggtgaataaatcaaatcatctgccgtgcggatagagcgtgccgacaagcggtatcagccgcttcacctcctctggcttgtaatagaacctgcggtttatctgcgagtagccgataagccgcctgtcacgcagcgtctgcaacgtgcgcgggcttattctcaactgcccgcagacctcctcgcccgtgagccatctttccatgcgccccgtgtcgcttttgcgcctcagggcggcgaccttctccgagagtgcgccgaatgccgccaccatcatctcgaaagtctttttctcgatagatactatttccatattcatgtcatttagagtttgccgcaaaggtaacgaaacggcatacaagacgtatcgttttccgctgaaaggctgcctgttgcgccgtttgaccgggttacggagccatcttccgcaaaaatcttacgtgagtcacgtagtgagttgttaaagccccttttgtttattgccgaattttgtcgcagaaacaaaaagaaaggactgaacatgaaagtgataacaatggaaagttccgcctacaaggagatgatggcgcagattgcgaacatcgcagggtacatccgcgaggcaagggacgagaagaaacggaagcgggaaaccgaagacaagctgcttgacacggcacaggcggcgaagatgctcaacgtgagcaagcgcaccatgcagcgtatgcgcaccgaccaccgtatcgagtatgtggtggtacgcggaagctgccgctaccgcctttccgagatactgcggctattggaggacaacacagtaaggaacgaggaagggacaatagacaccctgttccacaaccacacgctgcgcacgggcggcaaaccaaaaggaaggaggacataggtcatggaactgctcacacgaaacaacttcgagggctggatgcagaagctgatggaacggctcgaccgtcaggacgaactgctgctggcgatgaaggctgaggggaaacagcccactatcacggaaagcatccgccttttcgacaatcaggatttgtgcatgttgctccagataagcaaacgcaccctccaacgctaccgcagcgtaggcgcattgccctacaagacgctgggcaagaagacctattacagcgaggaggacgtgctgacattcctttccaaccatatcaaggacttcaaaaaggaagatatagccttctacaaggctcgtatccataatttctttcataaataacccattaaaacatttttcagatggcaaagaaaaaagacgaaaaggacgtgctggtagtccgtgacgagaagacaggcgagatcagcgtggtagccgggctgaacgcggacggcacacccaagcgcacccccgcaaaagcggagaacgcgcagagtttcctgcaattcgaccgacatggcgacgtgctggacaacttcttcaagaacttcttccggcagtgcaaggaacccagccgcttcggtttctaccgcattgcggcagaccaagctgaaaatctcttagaggtgatgaagcaactgctgaaagaccccgaagcgaacaaggagctgctcgcccctcacaaggtggacacctccgactatgagaagaaggtgcaggaagagatggcagcacaacagacagagaaacaagaacctcaaaaacaggagaacatggaacaacggaaagaacagcaacaggacaaatccgaacagatgcagggcaaacgtggctaccagcccatcgacgagagtaaaatcaactggcaggagctggaggacagatggggcgtaaagcgggacaaccttgaaaagtccggcgaccttacgaagatgctcaactatggcaagtccgacttggtaaaggtcaaaccgaccttcggcggcgaatcattcgagctggacgcccgcctctccttcaagaaggacggtgagggaaacatcagcctcgtgccgcacttcatccgcaaggagcagaagctggatgagtacaaggaacacaaattctccgacaatgaccggaagaacctccgcgaaacgggcaatctcggtagggtcgtggacattgtggacagggaaacgggcgagatcatcccctcctacatcagcatcgaccgcaagacgaatgaaatcacggacattccggcaagcagggtgcgcatcccggagcgcatcggcaagacggaaatcaccacgcaggagcgggacatgctccgcgccggactgcccgtacgcgacaagctcatcgagcgcaacgacggcagaaagttcgtcaccaccctgcaagtgaacgtggagcagcgcggcgtggagttcgtgccgggaaccggcaagtcgccccgtaccgcacagacacaggaaaccaaaggcgacacatcgaaaagtcaggcgcagggcggggaaaatgccgcacagaccaagaaggagcaacgccgcaacacgtggacgaacgaggacggcagcatccgccccatcagcaaatggagcggcgtgagcttcaccgaccagcagaaagccgactatgtggcgggtaaagccgtgaagctggagaacgtgaccgacaagcagggcttccatgccacgatgtatatcaagttcaacccggagaagggacgcccgtaccgctacgacacgaaccctgacaatgcacagcaggttgctccgtccaacgagagccgcacgcaggtggcggtgaacaacgatggcaagaccaacgaggctacaaagaatctgagagagccgttgcagaaaggtcagaccaacccgaaggacgcccgccagcaacagcagcaggagaagccgcagaagaaaacgggcaagggcatgaaaatgtaatcccgtgtccgccactgaatccaaaataaaatccaaagtatcaacaaaaaagaagaagacatgaagacaatcattgcagaaaagccctccgtggcacgtgaaatcgcccgcatcgtgggcgcgacaaagagagaggaaggatatttcgagggaggcggttatgccgtgacatgggcattcggacacctcgttcagcttgccatgcccgacggctacggcgtgcgcggatttgtccgtgacaacctcccgattattcccgacacattcacgctcgtcccccgtcaggtcaggacggagaaaggttacaagcccgacagcggcgtggtgtcgcagataaaagtcatcaaaagactgttcgacacaagcgaacatatcatcgtggcgaccgatgccggacgcgagggagagcttatcttccgctacctctaccactatacgggttgcaccactcctttcgtgcgcctgtggatcagctctctcaccgacaaagctatccgcgagggactgcggaaactcgaagacggcagcaaatacgacaacctctacctcgccgccaaagcgcggagcgaatccgactggctcgtgggcatcaacggcacacaggcgttatccatcgccgccggacacggcacgtattccgtggggcgggtgcagacaccaacgttggctatggtatgtgaacgctactgggagaaccgccgctttacgtccgaagcattctggcagctccatatcgcaacggacggttgcgacggcgaagtcgtgaaattctcatcctccgagaaatggaaagagaaagaaccggcgatggaactatataataaggtaaaggcggcaggttgcgccactgtcacgaaagccgagcgcaaggagaagacggaggaaactcccttgctctacgacctgaccacgctccagaaagaagccaacgccaagcacggcttcacggcggaacagacgcttgaaatcgcgcagaaactctacgaaaagaagttgataacctatccgagaacgggaagccgctacatccccgaagacgtgtttgccgaaattcccaaactgctcgctttcatcggcacacagcccgaatggaaagacaaggtgcgggcaaaagccgccccgacacgccgcagcgtggacgacggcaaggtgacagaccaccatgccctgctcgtcacgggtgagaaaccgctcttcctctccaaagaggacaataccatctatcagatgattgccgggcgcatggtcgaggcattctctgagaaatgcgtcaaggatgtgaccactgtcacggcggaatgtgccggagtggagtttaccgtaaaaggcagcgtcgtgaagcaaaccggatggcgtgccgtctatggcgaggaaaaagaggaaattaccatccccggctggcaggaaggcgacacgctgacaccgaaaggctcgtccattaccgaaggaaagaccaaacccaagccgctgcataccgaagccaccctgctctcggcaatggaaacggcgggcaaggaaattgaggacgacgcactgcggcaggcgatgaaggactgtggcatcggtactcccgccacacgcgcctccatcatcgaaacgcttttcaagcgcggttacatggaacgctgcaagaagtcgcttgttcccaccgaaaaaggacttgccctcaattccgtcgtcaagacgatgcgcatcgccgatgttgccatgacgggcgaatgggaaaaggagctggcgcgtatcgagcgcggggaactgtccgacgacaccttccgcaaggagatagaggcgtacacacgtgagataacctccgaactgatctcgtgcgacaagctcttcggcagccgtgactccggctgcgcgtgtcccaagtgtggcacgggcaggatgcggttctacggcaaggtggtacgctgcgacaacacggagtgcggactgcccgtgttccggctgaaagcgggacgcaccctgtccgacgatgaaatcaaagacctgctcaccgaagggcataccaagctgctcaaagggttcaagagcaaacagggcaagagtttcgatgctgttgtcgcctttgacggggaatataacacgacttttgtgttcccggaggctaaaaaggacaagaaattttcaggacggaagaaatagtattaactttgccacttgttcagagtaatgaattgttcttcgataccggattacactcatactttggatttagtggtggcactcggagggataccgagtgcctttttcttcctttttccaaccgattatcccgttaattatcaatccgctaaatccaaagtaatgaacaacaagaagaaaaacgagggtcagaccgacttttcctattacggtctgtacctgctggactatctccgcacgaacaagtttgaacaggctgacgacaccgctttcatacgggaacgggccgaccgtgccgccgaaacgtatgagagggcacggcttgaaggctatcccgccgatggtgcgcaggaactggcgatggacacgctgctgcgcgggctgcattattcccgttacgccatcctccgcgaagtcgtggaaaacgagtttgccgatgaagtgccggaagagaagcgtgaagcctttgtcctgaaactgctgccgcttgtcggcaacgtgttctccgtctatgacctctcggatgacaatttcgccctgtcttccgattacgacctgctctacacggagctgacgggagcaaccgtcctttacttagacgaatatggcgtttaaccgcaaacagaaactgcgggacaacatcgaggcgatacggacggcattcatccttgacagggaaaataggacagcgacaaccgaagagcgtgccatacttcaaaggtactgcggtttcggcggtctgaaatgtatcctcaaccctgcaaaggaactgacggatgccgtccggtgggcgaaatccgacctcgaactgttcgccccgacggtggagctgcacaggcttatccgtgagaacagcaaggacgaaacagagtacaagcggtttgtggattcgctgaaagcgtccgtgctgaccgctttctacacccccaaagagataaccgacaccatcgcggacgtgctggcagattacagcgtccgccccgcccgtatgctcgaaccgtcggcaggtgtcggcgtgttcgtggattccatgctgcggcacagccccaatgcggatgtgatggctttcgagaaggatctgctcacgggtacaatcttgaggcatctctatcccgaccagaaaatgcgcacctgcggttttgagaaaatcgaaagaccgttcaacaattatttcgacttggcggtgtccaacattccgttcggtgacattgccgtgttcgacgcggagtttcagcggagcgactctttcggcagacgctccgcccagaaaaccatccacaactatttctttctcaaaggactggatgccgtgcgtgacggcggtatcgtggcgttcatcacctcgcaaggggtattgaatagcaccaagacctccgtgcgtaacgagctgttcagtcaggccaatctggtatccgcgatacgcctgcccaacaacctgttcacggacaatgcgggcacggaggtgggcagtgacctgattgtcctgcaaaagaacctcagcaagaaggaaatgtcgcaggacgagcggctgatgaccgtgatacagacggacacgaaaaccgccctgaccgacaacgcctatttcatccaccacccggaacgcatcgtgcatacgatggcgaaacttgacacagacccctacgggaagcccgctatggtttatctgcacgagggcaaggcagcaggcatcgccggggatttgcgccgtatgctcgacgaggatttccattacaggcttgccatgcgcttgtattcgggttcaatccggcaggcaggaacggaagaaaaagttgccgttcaaaataaagtagagcgtcctgccataaaattggaaacagtatcctcggcgcagacggtggaaactccgacagaaaagccgcaacccgcagatgaaaagccggagatagaaccgcgcccgcaatattccgcaggcgtgcagctcaccctgcttgacctctgggggatgacggaagaggtcagccaaccgaaaacctccaaaaagaaaaagacggtgaaaaaggcagttacggcaaagtccactccgcccaaaccgaaagtcacggttacaccgacagctccaactgcaaaacccgcaatggagaataaggaggtgaaagcggagaacaccgccaagcctgccgacccggacgacatctatgccacactggactgggataccaatcctcccatcaacggtttctatgaaatgatgatgggtttgacgccggagcgtaggaaagaacttcgggaactggcaaggcagcataacgagaaacaagtggcggaaaagacggaagtgaaagccgtgccggaaacttcccgtgagcagccacgacaggaggaaacacagccggaggcagtcgccgcacctgccgttacagataccccatcggaagcggtggggactttccttttccccgacatcgaagcggaaaagccgaaggaggaagtcgtggacctttctccgcgtgcctaccaccgcacgccggagatgcacctgcgcgaagggtcgctggtggctgaccgggggcgtcataacatcggctacctgaaagacatcacgccatacggggcgacattccagccgctcgacctgaaaggataccagaaggaaaaggcgttgttgtatgtgtcgctgcgtgacgcctacgagcgtctgtaccgttatgaatcgctccggcgcgaggcaaatgttccgtggcgagagcatctgaatacctgttacgatgagtttgtcatgcgctacggcaacctcaacgccaagcagaacgtgaagttagtgatgatggatgcgggcgggcgcgacatcctttcgctggaacggatggaaaacggaaagttcgtcaaggcggacatcttcgagcatcctgtttccttcgcggtggagagccatgccaacgtaggctctcccgaagaagccctgtctgcgtcgctcaacaaatatggtacggtcaatctcgactatatgcgggagataaccgacagcacggcggaggatttgctcactgccctgcaagggcgcatctactacaatccgctcgtgaccggttacgaaatcaaagaccgtttcatcgccggaaatgtcatagagaaagcggaacgcatagaggcatggatgggtgacaatcccgaaaatgagcgtatgccggaggtgaagcaggcgttggaggctctgaaagatgccgagccgcagcgcatcgccttcgaggatctggacttcaatttcggggaacgctggattccgacgggtgtctatgccgcctacatgagccggctgttcgacacggaggtgaaaatcgcctattccgcaagcatggacgagttttcggtggtgtgcggctaccgcaccatgaaaatcacggacgagtttctggtgaaggggtattaccggaactatgacggtatgcacctcctaaaacacgccctgcacaacacctgccctgacatgatgaagtccatcggcaaggacgagcatggcaacgacatcaagatgcgcgacagcgagggaatacaactcgccaacgccaagattgacgagatacgaaacggcttctccgaatggctcgaagagcagtcgccgcagttcaaggagcggcttgtgacgatgtataaccgcaagttcaactgtttcgtgcgcccgcgctacgacggctcccatcagacctttcccgacctcaacctgaaagggctggcaagccggggtatcaagagcgtctatccctcacagatggattgcgtctggatgttgaaacagaacggcggcggaatttgcgaccacgaggtgggaaccggtaagacgctgataatgtgcatcgccgcgcatgagatgaagcgtctgaatttggcacacaagccgatgattatcgggctgaaagccaacgttgcggagattgcagccacctatcaggcggcatatcccaacgcacgtattctgtacgcttcggagaaggacttttcgaccgccaaccgtgtgcgcttcttcaataatataaagaacaacgactacgattgcgtcatcatgtcgcacgaccagttcggcaagataccgcagtcgccggaattgcagcagcgcatcctgcaagcagagcttgacacggtggaggaaaacctcgaagtgctacggcagcagggaaagaacgtgtcgcgggcgatgctgaaaggattggagaagcgcaagcacaaccttgaagcgaagctggagaaggtggaacacgccataaagtcacgcacggacgacgtggtggatttcaagcagatgggcatcgaccacatcttcatagatgagagccaccagttcaagaatctgactttcaacacgcgccacgaccgtgtggcgggattgggaaacagcgagggaagccagaaggcacttaacatgctctttgccatacgcaccatacaggagcgcacaggaaaagacttgggtgcgaccttcctctccggcacgactatcagcaactcactgactgaattgtacctgctgttcaagtacctgcgcccgaaggagctggaacggcaggacataaggtgtttcgacgcttgggcggcgatatttgccaagaagacgacggattttgaatttaacgtgacgaacaatgtggtccagaaggagcgtttccgctacttcatcaaagtgccggagcttgccgccttctataatgaaatcacggactaccgcacggcggaggatgtgggcgttgaccgtcctgccaagaacgagatactgcaccatataccgcccacgccggaacaggaggacttcatacagaaactgatgcagttcgccaagacgggcgatgccaccttgttgggcaggctgccgctttcggaaacggaagaaaaggcgaagatgctcatcgccacggactatgcccggaaaatggcactcgacatgcgcatgatagacccgaattacgaagatcatcccgacaacaaagcgagtcactgtgccaagatgatcgcggagtattatcaaaaatacgacgcccagaaaggcacgcagttcgttttctctgatttggggacataccagccgggcgacgggtggaacgtctattcggaaatcaagcgcaaactgacggaggactacggtataccgccaagcgaggtgcgcttcattcaggagtgcaagaccgacaaggcgcggaaggcggtgatagacgccatgaacgccgggacggtgcgtgtgctgttcggctctacctctatgctcggaacgggtgtgaacgcccagaaacggtgtgtggctatccatcatctcgatacgccgtggcgaccgtccgacttgcaacagcgtgacggacgcggagttagggcaggtaatgagattgccaaacatttcgccgggaacaacgtggatgtaatcatctacgcggtggagaagtcactggacagctacaagttcaacctcctgcactgcaagcagactttcataagccagctcaaaagcggtgcgatgggtgcgcgtaccatcgacgagggggcaatggacgaaaaatcgggcatgaatttctcggaatacatggcgttgctctccggcaataccgacctgttggacaaggcgaaactggaaaagcggatcgcatcgctcgaaggggaacgcaagtcgttcaacaagggcaagcgtgattcggagttcaagctggagtcaaagaccggcgagttgcgcaacaacacggctttcatagatgccatgacggaggactggaaccgcttcctgtcggtggtgcagaccgacaaggagggcaaccgccttaatataataaaggtggacggagtggattccgccgatgagaaggtcatcggaaagcgtttgcaggagatagccaagaatgccacgaccggagggttgtacacgcaggtcggtgaactttacggttttccgataaaggtggtgagcgaaaggatactcaaagagggattggagttcaccgacaaccgcttcgtggtcgaggggaactacaagtacacctacaacaacgggcatctggcgatggctgacccgttggccgccgcccgcaacttcctcaacgcgatggagaggataccctccatcatcgaccagtacaaggcgaagaacgaggtgctggagatggagataccgcagttacaggagatagcgggtaaggtgtggaagaaggaggacgagctgaagcagttgaagtccgaacttgccgcccttgaccgaaaaattcagctggagcttgcgccacccacgcccgaagtcgcagaaaaggagaatgaagggcaacagctcaagccggaagcggaagatgtgaggaacaggcaggcgcaatatcccgaaaatgcaccgccgcagatacgcagtccggcggatagtatcgttgccaaccatgtcataatcgggcgtccgggactgtatgccaaggaggaaacccggtccaaaggattgaaaatataacctaaggaattttatctgaagtattaataagggctatcccaaaaggtctaaaagtaaattttatcctttctgcaagtatctataggatggcaactgcatttttttctttttgggcagcccttattaaaatttattcttattttaggttatatacattcatgtccatttatgtaaaaaattcctgctgaccttgtttatgtcttgtcagtcaccatttgcaaaaccatatttgaccctcaaagaggctgaatttgataagtaacttgctacatactcataataaggagctaaatagaacacgaatgggaaatacacaaatgctaaactaaagaagatattggccaaaataaacgctataccgagagagaaacttgatttttcaacttcctaaaacggtgttgttcaaacatttctacttatttgtacttgccagttgaacctacgcttccctaataaaatgtctatggtaaaaagttaaaaaatcctcccacttttgttagatatatttttttgtgtaattttgtaatcgttatgcggcagtaataatatacatattaatacgagttagtaatcctgtagttctcatatgctacgaggaggtattaaaaggtgcgtttcgacaatgcatctactgtagtatattattgcttaatccaaatgaatattataaatttaggaattcttgctcacattgatgcaggaaaaacttccgtaaccgagaatctgctgtttgccagtggagcaacggaaaagtgcggccgtgtggataatggtgacaccataacggactctatggatatagagaaacgtagaggaattactgtccgggcttctacgacatctattatctggaatggagtgaaatgcaatatcattgacactccgggacacatggattttattgcggaagtggagcggacattcaaaatgcttgatggagcagtcctcatcttatccgcaaaggaaggcatacaagcgcagacaaagttgctgttcagtactttacaaaagctgcaaatcccgacaattatatttatcaataagattgaccgtgccggtgtgaatttggagcgtttgtatatggatataaaaacaaatctgtcgcaagatgtcctgtttatgcaaactgttgtcgatggatcggtttatccggtttgctcccaaacatatataaaggaagaatacaaagaatttgtatgcaaccatgacgacgatatattagaacgatatttggcggatagcgaaatttcaccggctgattattggaatacgataatcgctcttgtggcaaaagccaaagtctatccggtgctacatggatcagcaatgttcaatatcggtatcaatgagttgttggacgccatttcttcttttatacttcctccggcatcagtctcaaacagactttcagcttatctctataagatagagcatgaccccaaagggcataaaagaagttttcttaaaataattgacggaagtctgagacttcgagacgttgtaagaatcaacgattcggaaaaattcatcaagattaaaaatctaaagactatttatcagggcagagagataaatgttgatgaagtgggtgccaatgatatcgcgattgtagaagatatagaagattttcgaatcggagattatttaggtgctaaaccttgtttgattcaaggattatctcatcagcatcccgctctcaaatcctccgtccggccaaataagcccgaagagagaagcaaggtgatatccgctctgaatacattgtggattgaagacccgtctttgtccttttccataaactcatatagtgatgaattggaaatctcgttatatggtttgacccaaaaggaaatcatacagacattgctggaagaacgattttccgtaaaggtccattttgatgagatcaagactatctacaaagaacgacctataaaaaaggtcaataagattattcagatcgaagtaccacccaacccttactgggccacaatagggctgactcttgaacccttaccgttaggggcagggttgcaaatcgaaagtgacatctcctatggttatctgaaccattcttttcaaaatgccgtttttgaagggattcgtatgtcttgccaatctggtttacatggatgggaagtgacagatctgaaagtaacttttactcaagccgagtattatagcccggtaagtacacctgctgatttcagacagctgaccccttatgtcttcaggctggctttgcaacagtcaggtgtggacattctcgaaccgatgctctgttttgagttgcagataccccaagtagcgagttccaaagctattacagatttgcaaaaactgatgtctgagattgaagacatcagttgtaataatgagtggtgtcatattaaagggaaagttccattaaatacaagtaaagactatgcctcagaagtaagttcgtacactaagggcttaggcatttttatggttaagccatgtgggtatcaaataacaaaagacggttattctgataatatccgcatgaacgaaaaagataaacttttattcatgttccaaaaatcaatgtcattaaaataatggagcggtcaggaaatttctataaggcaatacggttgggatatatacttatctccattcttatcggatgtatggcatataatagcctctatgaatggcaggagatagaagcattagaacttggcaataaaaaaatagacgagctccgaaaagaaataaacaatatcaatattcaaatgataaaattttctctattgggtgaaacaatactggaatggaacgataaagatatcgagcattaccatgcacggcgtatggcaatggacagtatgctctgccgtttcaaggccacctatccagcagagcgcatcgatagtgtgcgcagtcttttagaggataaggaacgacagatgttccagatagtccggttaatggatgaacaacaatctattaacaagaagatagccaatcaaattccggttattgtacagaaaagtgtgcaggaacagtccaaaaagccaaaacgaaaaggtttcttaggcatattcggcaaaaaaaaggaagtaactccagcagtatcaaccactatccttcattcggtcaatagaaacgtaatcagcgaacagaaagtgcaggatcgccaattgtcggaacaagccgacagccttgcagctcgtaatgcagaacttaacagacaactgcaagaattgatttgccaaatagaagaaaaggtacaaaccgaactgcaaagccgggaaaacgaaatagttgccatgcgtgaaaagtcatttatgcaagtaggcggtttaatgggattcgttcttctattgttgttaatttcctacatcatcatacatcgtgatgcaaaaagcattaaacaatacaagcacaagacaactgatttgataaggcaactggaacaatccgtacaacggaacgaggcactgataacgtcaaggaagaaggcggtacatactatcacccatgaactgcgcacaccgctgacagcaataacaggctatgccggactgatacggaaagaacagtgtgaggataagtccgggcagtatatccaaaacatactgcaatcctccgaccgtatgcgggatatgcttaacactttgcttgacttcttccgcctggacaacggcaaggaacagccccgtctgtcaccctgccggatttcagcaatcacgcacacacttgaaacggagttcatgcctgttgccgtgaacaaagggctgtccttgtccgtgaagactggacacgatgccattgtattgaccgacaaagagcgaataatacaaatcgggaataacctgctgtcaaacgctgtcaagttcacagaagaaggcggtgtttctttgattactgaatatgataatggagttctgacactggtcgttgaagatacaggtacaggcatgacagaagaggaacagaaacaagcgttcggtgcgtttgaacgtctatcaaatgccgccgcaaaggagggtttcgggcttgggcttgccataatgcgtaatattgtgtcgatgcttggcggaacaatccgtttagacagcaagaaagggaaaggcagtcgtttcacagttgaaatttctatgcaggaagctgaagaacagcttggatatacaagcaatacacctgtttatcataacaataaattccatgatgttgtcgccattgacaatgatgaggtattacttctgatgctgaaagagatgtattcccaagaaggaatacactgcgacacttgcaccgatgctgcggcactgatggaaatgatacgccagaaagaatacagcctgttgctgacagacttgaatatgcccgatataaacggtttcgaattgctggaactgttgcgttcgtccaacgtgggcaattcaccaacaatcccggtggttgtggcaaccgcttcgggcagttgtaacaaaggggaactattggcaaaaggctttgccggatgcctgttcaaaccgttctccatatcggaactgatggaggtttccgacaggtgtgccataaaagcgacaccggacgggaaaccggacttttccgccttattgtcctatggcaatgaagccgtcatgctggaaaagttgataactgaaacagaaaaggaaatgcaggcggtacgggatgcagcaaaagaaaaagacctgcaaaagctggattccctgatccaccacctgcgcagttcgtgggaggtgctccgtgccgaccaaccgctgaatgtactttacggattgcttcgtggcgatgctctcccggatggtgaagcgttaagccatgccgtgactgccgtgctggataagggagtggaaataatacggttggcagaagaggaaaggagaaaatacgaagatgaataagacaaaaataattgtggtggaagacaacatcgtgtattgcgaatatgtctgcaatatgctgtcacgggagggctaccgcaatatgaaggcttaccacctctcaaccgcgaagaaacatctgcaacaggcaacagataatgatatcgtggttgccgacctgcgtctgcctgacggcagtggcatagaccttttgtgctggatgcgaaaggagggaaagatgcagcccttcatcattatgaccgactacgccgaagttaataccgccgtggaaagcatgaaactcggctcgatagactatattcccaaacagcttgtggaggataaacttgtccccctgatccgttccatactgaaagaacgtcaggcaggacaacgccgtatgcctatattcgcccgtgaaggttccgcctttcagaaaatcatgcaccgcataaggctggtagccgccaccgatatgagcgtgatgatatttggtgagaacggcacgggcaaggagcatattgcccacctgttgcatgacaagagcaaacgtgcaggcaagccatttgtggcggtggactgcggttcactctccaaagagcttgcaccgtcggctttcttcggacacgtcaaaggtgcatttacaggtgcggacaatgccaagaaaggatatttccatgaggcggaaggcggcacgttgtttctggacgaggtaggaaacctcgcgttggaaacccaacagatgttgctccgtgccatacaggagaggcggtatcgcccggtcggagacaaggcagaccggaatttcaatgtccgcatcatcgctgctaccaatgaagatttggaggtatcggtgaatgaaaagcgttttcggcaggatcttctgtaccgcctgcacgacttcgggataaccgttcctccgttgcgtgactgtcaagaagacattatgccgctggcagagttcttccgtgatatggcaaacagagagctggagtgtagcgtgagcgggttcagttccgaagcacgtaaagcgttgctgacacacgcatggccgggcaacgtgcgggaacttcggcagaaagttatgggtgctgtattgcaggcgcaggaaggtgttgtcatgaaagagcatctggaacttgccgtgacgaaaccgacctctactgtcagcttcgccttgcgcaatgacgcggaggataaggagcggatattgcgtgcgttgaaacaggcaaacggcaaccggagtgtcgccgcagaactgctcggcataggcaggacaacactatacagcaaacttgaagagtatggacttaaatataaattcaagcaatcatagcccgtaattcactgaatttggctatctttgcataacatttgagaaaaacggcgattggcaggagcttttcgccgccaacatataggataagaccgcaaggcgtttcaagcgaaaatctggtaaattggaactacggagacgattgcgtgatgcttatgctatgcttacgcatagcgtgcattcacgtactctccgtaaaggctttaccagagccatcgcttgaaggtagtgtgaattgcacgctacttttttacccttgcctaacgaaaggaaacgattatgggtaaagttcagattctcgccgtactgacgatggacggatgtctttcttcagagttatatgataaagcacatcaggatttgtgccttgaccgttgcggtcttgatgaaatcaggaagaaagccttttaccgtgtgacaccggactattccatttcaatgctgcacgaatggagaaaagactgcacaaacatccgttacctcgcggaagccacaccggacacggcagactatataaacggactgctgcggatgcacgctgtggatgaaatcatactatacaccgttcctttcatatccggaagcggacgacatttttttaagtcggctctgccagagcaacactggacgctttcctctttgaaaagctatcccaacggtgtatgtcgcattatctatatccttgataaaaaagcaagatagccaaaatgtgcggcaagcatacatttctattttcaggaatagaataaatgttccgattacaaacaatttaagtcggagataatttgtccttgtgaaaaaatactgaattttatacctctgaaatccagcactttgtaaaattgagtgttggattttttattttctgccgcgttttttgccaattatattcatgtgcgcacgcagaaaacaaagtgtaattttcaaaattgacagaaccatgaattatttcttgctggcggaaaccgactttttccgcctgataaacgaagccggcgactgcaatatggaaacggtatacacggctttcgccacccaagtgatcgaactgtgcaacggcggcatggacatgaaccttaccgtcatcgcgcttgcctacatcgaaatcgagttgcagcaccatcccgtacgtaatctgtcagaagaaaaaagagagattgccgcctacgtcagcaaggctctgtctttcgtaagaaagatgcagaaattccttgccacgccccaagtgccaccactaatatccgccaacaacgcaacagaaaccaccgccagccttcttcaatggacgggcaatgccatcgacctcgtggaacttatctacggcatagacgtgatgggctgcatcaacaacggcaatatgccgctcaaacagctcgccccacttctctataagatattcggggttgattctaaagactgctaccgcttctacactgatatcaaacgccggaagaacgaaagccgcacctatttcattgacaggatgcaggaaaaactgaacgagagaatgttgcgtgatgaggagttggagcggatgagaaaataaaaaaatatccattacatatgagaagacaggaatactcgtatcctgtctttttattttcatttaattatatattaattagcacaatatatgtgagtttttcattcctataaggacaaatttcagaaacgtatgtctggtaaattattgagtcatcatagtatgaacatatatcattactaaaaacaatgaaacaacttccataagattgtggttgtaaaaatcgccatttaatagcccgttttttttgtaaaattcgccaattaaaaaaatatgattatctttgcattatattttataaggtatggaaacagtaaatagaatacttcaagagaagattacagcacgaatcgcgcccaataaagcagtactgatttttggtgctcgccgtgttggtaaaacggtaatgatgcgtaaaattgtggacaactattcaggtaggacgatgatgctcaacggcgaagactacgacacattagcactattggagaatcgctcaatagccaattatcggcatttattggatggtattgatttgctggctattgatgaggcacagaacataccacaaatcggtagtattctgaagttgatagttgatgaaataccgggaataagtgtcttggcaagtggttcttcgtcattcgatttgctgaataagactggtgaaccgttggtcggccgcagtacgcaatttctccttacaccattctcgcaacgggaaatcgcacagacggaaacggcacttgaaacccgccagaacctcgaagcgcgcttgatttacggttcctatcccgaagtagtaatgatggagaactatgaacgtaaaacagactacctacgtgatattgtcggtgcatacctgcttaaagatatcttagcaattgacggcttaaaaaattcgagcaagatgcgcgatctactgcgattgatagcttttcagttgggcagcgaagtttcttacgaagagttaggtaaacaactcggcatgagcaagacgaccgttgaaaaatacctcgacctattggaaaaggtcttcgttatctatcgtctgggggcttattcgcgtaacctacgcaaggaggttacaaaagctggcaagtggtacttctacgacaacggcattcgcaatgccattatcggggctttctcaccgctggccattcggcaggatgtcggtgcgctgtgggagaactacatcatcggagagcggcgcaaagcgaacttcaatgagggactgcacagggagttctatttctggcgcacctacgacaaacaggaaatcgacctgattgaggagagtgccgacagtcttaccgccttggagttcaagtggggaaataaaatgccggccgcaccgaaagccttccaagaagcctatccctatgccgagtttcatgtggtaaatcgggagaattatttggagttcgtataatcaataaattacgtatatggaaacaaaactacaatccaaacagcaatatccgcggtttatccaaaataaaccgtgtggtattgacaaattcgatggaggttcgcaagaaaggttggcaaaaactattgctcgccatttttgtcagaatgattcattggatgaggaatgtactttacctcgaattatcggcatcgaaggtatttggggatctggaaaatccaacgtggttaaaatgttggaacgtgaattatcagacgactattacttttttgagtatgacgcatggggacatcaagaggacttgcaacgccgctctatattggaattgcttacaagcaaacttattgatgatggtatcctatctggaaatgcaacaataaaagtcaaaggtggaggtacgaaaaccgtatcatggtctgaaaagctgaaatatttattagcccgtaaaacggagaccgtaaccgaaaaatatccccttatcagtaatggtatggttgcggcatttttggttgcagttttaactccgatatttacatttattgcgtatgcagtaaaacctacacccacaacatggtggttttctttattgtctattatcatagctgcactgccagttcttattgcattgtgcgtttggaaatgggcatatagcaaagatcataaatatggatggagttatatgttagctatttatcaagataaagtcgaaaaggacgtttgctatgagactttgagcgaagacgaaccaacggtttacgagttcaaaacatggatgcaagacatttctgattttatcaaggaaaaaggacaacgtaaattagtccttgtttttgacaacatggatcgtctccccgctgaaaaagtaaaagaattatggtcttctatccatacgttcttcgccgatagcggttttgaaaatgtttgggctgttattcctttcgatgaaacacatttagcttgtgcattcggagatgagaccgacgaacaaacgaaacaactgaccaagtattttatcaataaaactttccctattgtttatcgtgttgctcctcctgttattaccgactatcgaagtatattcaacaaactgtttgttgaagcatttggagaaacagaaaatgaagcgaaagaaactataaatcggatattcagattggtaaatcctaatgccaatgttagggaaattatatcatatatcaatgagatggtcgctcttaaacaagagtggtgtaacgaaattttgatgataaacatagcattgttctgtttgaagaagacggatattctggcaaatccagtagaacaaatattgtccggcgactatctgaatggcattcaaacaataattaacaatgatctgcaaacacaacgcgaaattgcagctttggtatatggtgtcgatgttgaagatgctcgacaaattccattgaaaaaatatattgaaggctgcatcaacggagaagaagaccacgacataaatcaatatgcagagactaataaacaatttgacactgtattagaagaagttatacaatgtatggacaatgcgcttatcgataagattatacattgtttgcataaattaactcgaaagagcgatgttattctgcgtgtatggcaaagaatagcacaattgaaattaaaagaatccatagagaagcaggtgttccctgtcgaataccaagaactgctgttgcatttagacacggaaagccaaaaccatgtgattgctcaattatataagaagatagttcggttcaatgacttcaatggcggcgactatttcaaaacgttagatgcaatagacaggtttattgcgcaaaataagttggcgtgcgattttacgtcattgattgaagcaaaaacagtcaagccaaatacatttatcgattatattcaagctgcaaatgcaacagatgctgcctatcgggataacgcgacaactaaagcatataaatattatcaagtagcaacaaattcggaggcgctcgataattatttggcaaacttactacccgataatttcgaccatgcagatattgtaaaaacgttaaaagataattctacctatacgtttccaacgcttttgcaagcgatcacgaattgcattgatgaacagaatgtaaataaagataatataggggctatatttacaacctatcgtttattggcatctgacgaagaaagacctttacctgtaacgttagattcaacctacataaatcagttgcattctgaattagaaactgatggccgaaacattaaagagtctggatattacgatttagtcgccatgcaattggcacatggtcattccgtttccttaatagagggtggagatataaaatatgttgcagaactcatggactattatgtggatcatggagacttattagtaaatagtgtgggatggaatataccgctattaaatgaaacactacaatacatggtaaatcataaacttggctataaattattgctctcagacatattgccccaatttgaagatattaagaacagaataggtgtaacggatgaggtatttatcgagcatttagcagagtggaataccgatttggataagtatatcactaagaacaatattaaagatgtaattcctgacgcatctttttacgatttgaccactaaaataagcaatgtcctgaccgatcatatcaataaaatagcgttcgaagcgttgtctgaaataagtgttgatacattatacgcccaaagaacagcacatacatcatattattggtttgtcgcaataaaacatttactggctaaaatcaaatccttgccagataacttgactgaatttggcaaaaagattctgatggatattgcttctggaactcaaagtttgaatcctttccctaattgtttcaagaatatagttgaaagattggataaacgaaaaattaaatcgacagttaccgatataagaaatgatttctgcatcggtaaaaagactatcaatgcaataaagtttcaatttttcgaaacatggcttagatcgcatggtaatttgaaaagtcaagctggagacgttattgataaaatagtgaaacctgtaatttccgatggggcatgccgttcattgattctgcaaaacaaagatttttatatggatttaataaatacagcaggggatgatgcttatgaattgaaaaagagtctccgaaacctcatacaaaaagattcagatccgcaattggttaaatttgtcaattcgatagattcagtacctgaggttgaaaccgcgtaagtatttgtctaacaagtccgaattttacgattttacccgtcagaactgaagtgcccccccaaaaaattgtatccaacttttgggggtcacttcaaacttcgatagggataattttcaattttggggacttgttagacagtctcattatctggtagcagtttacacagcaccggatcgtttttgatacgctccagttcctcctgcacaatctgcttcacctcttccttgatgcgccggtagttcgcctgcaccgtttccttcatgcggtcgttgccgtcctcgtccgtgaagtttgtaatgacgggaattttcttgtaggcactttcttcccgtttcaccttttcggcatccaccacaatctcgcaatgaaaaatcttctgctcgatacgctcgttgaagttgtcggatacagaaccgacaaacattccctgcgtaagcccggaaatcttactcggtggaatgagcgcgtccatctgcgtgttgatggaggtggaaacatcctgccggttgatggagatggactgccgtttctgcaacaccttaccgaaccgctcggagagcgtcttggctgtttcccccaccacctgaccggagaaaatattgccgacagtgttcatcaccactttcgcctctttgtccccgtagtcacgcactaactggctgaaatcctgaaagcccagacacacggcaaccttgttgcttcgggcggtagctataagattgtccaaccctttgaagtatattgtgggcaactcgtcgatgatgaccgatgacttcagcatccccttcttgttgatgagcttcacgatacgggaattatacagaccgagtgccgcaccgtagatattctgacggtcgggattgttacccacgcagaggattttcggctcttcgggattgttgatgtccagcgtaaactcgctgtctgacatcacccagtagagctgcggtgaaatcatcctcgaaagcgggatttttgccgacgctatctgacccatgagctgctccgcagcccctccaagccacgcatccatgaacggcgaaaggtagttctccagctccggataagaggtcagtatcggaaatatatcctcgtaacggcggttcagaaactcgatagcatggggaaacgtgcaaaacttcccgttctgatagattttgagataccagataatactggcaaacagaatgataggtgactccacgaagaagtcgccctgcttttgcacccacgttttattgaggttgagcattattgtgtaggcactctcataggcatccgtaatatcttccataaaatccgggtgaatgggattgcaccgatgagagcgtcgcgggtcgtcgaagttgatcacatagaacttcggctttaccttgtagccgtccgggtggttcagcaaatggttgtaggcaatagtagataggtcgggatacttgaaatcgtagatgtattgactaaagcccttttcaatctgttgcttgataaaattgtttaccacggcataggacttgccgctgcccggcgtacccaacacgatggacgcacggaagggattaactacattgatccaaccgttgttccagcgtttcctgtaatagaaacgtgtcggcagattgaccgaatactcgctttcgataagcctcgtttcctgcatgaaactctcgttctcgttgttgaaaacatcctccatcaaattgtgtttcaacaggcggctcatccacagaccacccatcaacaggcagacatagcccgttccaatggtaaggacatacagtcccgtcaccgcttcaagcggcagcggcaggggcagcaaccaccagttcaggaaaaacagcacgaacccgacggcaaatgctgtccagattctcccccaagtgattttctcacccttgacacccttcgtacccagacaggacaaggcaagcaaaaggacggaaaacagcttcgtgtagagaatggaatggaacagccccgccgtgcggtcgaagttcagaaggattttgtccaccacgccgatgttcacgccccacagccggatggcttcgtagcagaaccagtacacgttcatgaccactaaaatgatactcacggcacgcagaaaatccatgattttcgccaatgccctcaaatcgtcttcttgttgtgacatacattgattttttaattgttgatactctgattacatacccaagcccttgcgttttttcttctttttgcgcttcatcgcccggatgaaagcctcttcctcggcatctaccgccggaccttcgggagtgagcaagcccataccgcccgatatatcttcactgtcgtaggcggtctgcccgtgtgccttgtccgcagcatccacagggatggatagcggtatcggcggttgtccggcgtatggcagggtgaagtgttcctgcaaggcattcgccgaaagctccttacccatgcgcgaaccgttcagcacgcatcccgtgcggtggtcgatgaaggtagccccatagatgcgcccttcctctgtgtagcgcagtacggtgtcgatgcccttctctttgagttgggatacaaatttgtccttgtcataagtgccttgcagcacggaaaggacggtgcgtttcgtcatgtctgccagtttcctatccttgatttccgatttggaacggacaaacttcttctgtacggcttcatagcctgcggacttcccgaaaagcgaggatttgaacgggttgcccaccttgttacccttgtcgtccgtgacggaatagaccagcccgtgatactcccgtccgcgcacgttgcccctcgcttcctccaccgtcatattatataaggaaaggagcgcacggtattcgcccatcgtctggaaacggtactgcccattcagagccttcacggtgttgcctacctgcttcttcacatcacctgccgatgcggccaccttgcgcaacggattatccaatctctgatttttacgttctgccggatgcaatccgtacttctgttccagttccctgcggatacggtcgctgcggcggtagagaaaatcccggttgagccttttcccgttctcgtccacgttgaccgtcacgatgtgcaggtggtggcggtcgatgtcctcgtgcttgaatacaagataaggctggtttccgaaaccgagtttttccagatactcgcgggcgatattctgcaactcaatatcggtcagcacatcctccgggtgcgggttgagagagatatgcaccaccggcttctcgatcttcatctgcggtggcaggaaggtgagaaaaccctccatcgccttgcctatgtccaccgttcccgaaccgtcattgtagatgcggttggtggtgagaagccgcccctgcgcctcgttaatcttctccccgttgtaggcaatcgcgccgtacaacgaacttcctacactgatttttgcgaccattttgcctccatttcccttgaaagttccacaatccggcggctcagtttcacgagttcgacggtgtgttgctctaatttgtagagcaacgccatcgcctttttctctgaaaaatgcagcctcagttccttcacgacttggttgtaattcgtacccacggcacggaattgtgcatgaaaatccgacagtttggtgtaatagtccaccaacgtcttgtccaccttcagcaccttgaacggttgcccgaagaagtgcgctttgaggaaaacagaccgtgcatagacacccgattttccgaacatggcgaggaaacggttgtgttcctcctcgttgaaacggacggtgtaccggtacaccgccggatcaagtttgggatttctccctgatttgcttttccttttctctttcatattactttggatttagcggattgacggcataagccgccgcttcggattacagcaccgcagttctgaaaggcttcccgacttcggagggaaagcccgccccctgcaagggcaagtgcttttcgtggctgctcaaaatattttgagcggctgaaaagacatcttgctatgttcaggtgaacataaaaatccgtcaggggacggattgggaaaatacctttcaggactccgggccgcgcgtcatcggcgaaccctgctgtccgggtgcaaagttacgcccttaaagcggtatcggacagatgcttgacccggtcaatgactgccaaccggcgcaacgtgccgccacttgccggagaagtgatacaggttccaaaatatacttgtttatttgcagcatgattcaagaaacgaacgatttgaagatatgataaacggaacattcaaatacccggaaatccgcttcttcggatacttgccgaaacggatacccgaaccgtcggaaacccggttctccgacaattcggtgacgtatggattcaatgacttcatgacgcaatgtcgtcaatcaccatttgtccgacgcaccgcttcaccacagaaccggatacgcgacgacccgcctgcgtgtgtagtcacggaagcggatggtgcgacagccaaatccgtatggaaacagaaaaacaaatcatcaacaattaaaataaatggaactatgagtaaggaaatcttcgttgcattcgcaacacagaaaggtggcatcggcaaatccactgtcacggcacttgccgccagctacctgcacaacgtgaaaggctacaatgtcgccgtcgtggactgcgacgacccgcagcacagcatccacgggctgcgcgaacacgaaatggggcttatcgacagcagcacctacttcaaggctctcgcttgcgaccatttccgccggatcaaaaagaacgcctacaccatcgtcaaaagcaatgcggtgaacgccctcgacgatgccgagaggatgattgccactgaggacgtgaaacccgacgtggtgttcttcgacatgcccggcacactccgaagcaacggcgtgataaagacgctctcgcagatggactacattttcactccgctgagtgccgaccgctttgtcgtggagagtaccctgaaattcgtcacgatgttccgcgacaggctgatgactaccggacaggcgaaaacaaaggggctgcatctgttctggacgatggtggacggcagggagaggaacgacttgtacggcatctacgaggaagtgatagccgaaatgggctttccggtactttccacccgcttgcccgacagcaagaagttccgccgtgacctttcggaagagcgcaagagcgttttccgctccaccatcttcccgatggacacggcactgctgaaagggagtggcatccgggagttttccgaagagataagcgacatcatcagaccgcagtgagcatgggcagcaggaaagtgaacacggaaggcatcgacgaggaactgctgttagcctccatcgggcggcgcacacaggacgggacactgcgccccgcacaggaagtacccgcagctgcaccgaccgaagaggacaccgccgcaccggaaccatctcctgtgcaacccgtaacacgggaaaaagcgcagagggaaagtggacgccggaaaaggcaggacgaggactacaacgagctattcctgcgccgcaacgagataaagacccgccaatgtgtctatatcagccgtgacgtccacggcaagatcctcagaatcgtgaacgacatcgccggaggggaaatctcagtaggcggatatgtggataccgtgctgcgccagcatctggaacagcacaaggagagaatcaacgaactgtacaagaaacaacgtgaagatctgatttgaaaatggaaaaagaaatgacaccgaatgaaaaaagaccacagcaagactgcggaggtatgtttacccaagtgcaggcgagtgtggaaatactgtcgcctgtcccggtaagcggcaaatgcagtgagaaggactatgaacgcctgttcatccgcgacccggaagtaaaggcacgtgaggggaagatggcgtatgtgcgcccggagtaccacgagcgtatcatgcgtatcacccgtgtaatcgggcatgaccggcttacgctgtccgcttacatcgaccatgtgctgacgcaccacttcaaccagtgcgaagatgcgataaagagcctttatgcccgaaattacaattcagtattctaaccaaaaacggaaggatatgaattacacaatcagcatgacagacattctgctggcggtatcggtcggctgcaacctctggttcctgttcctgctcctttacgagcgcatcatggacacgcggattgtccgcttcttcaagggcattgtcggattatggcggtcactggacgggaatgaggctaaacgcatagcggcacacgaggaagtccctgcggaaaaggcggacatcatcggcaagagccgtttcaggatggcatccacccggacaaccgctgccataccgacgcaagaagccgccactattgaaaaaggcattgagctgtcggaggaagaggctacttttgacgacggaaaaacgggaaacgcatcccgcccggcacaagtcccggaggaaaaactcgatgagaccttcacgagcataccgccggaggaactgggatacggggacgacgaaccggaagaggacgcctcggacacgccacgggcttcgggcagcagctttgacgagattgacgacgcctgcaagaccgccaaaaacccggacgcgacacaggcggaacgtgaaaaggcggctaaggtgttcaccgacatggagggcacggagttgtacgagaaaatgatggaaggctcttcggagataggcatccgcatcaaggggcttatcgagattcggctgaagaaatctgaaaaggagttcgtcgtgccggacaacatcgaggagttcgacattcgcaactatgtatgacaacaataaaagaaatgaacatgaaagaatgacatcaacccacgcggcgaggaaacgcaaggcgcatccccatccgcaacggacacgcccacgtccgtggaaacaaacgggcatccactaaaaccaaagtaaagaaacaaagtatcaaccgcccgacaaaggaccatccacccttttgacggcaaaaaacaagaacagtttatgaacaagaacatcttgaaaaacagaaaagcaatcctctccgcggcacttgtcatcgccgcaaccgcctccgctttcgcgcagggaaacggcatcgcgggcatcaacgaagccacctctatggtgagttcttatttcgaccccggaactaaactgatatacgccatcggtgcagtcgtcgggcttatcgggggcgtaaaagtgtacggcaagttttcatcgggcgaccccgacaccagcaagacagccgcctcgtggttcggcgcgtgcatcttcctgattgttgccgccaccatcctgcgctcattcttcctttaataaataatgtatggctgaatacccaatcaacaagggtatcggccgtccggtagagttcaagggcttgaaggcacagtacctcttcatcttctgcggaggtctgctggctctcttcgtcctgttcgtcatcctctacatggtcggtatcgaccagtggatatgtatcggcttcggcgcggcatcgtcctccctccttgtatggcagaccttcgcgctgaacgcccggtacggtgaacacgggctgatgaaattaggagcggcacggagccatccccgataccttatcaaccggcggcggataacccgtctgttcaaacgacaacgaaaggaagaaagacaatgaggaatacatcgaaaatgacaacactggaaaacaggttcccacttttagcggtggagcatggctgcatcatctcaaaggacgccgacatcacggtggctttcgaggtggaactaccggaactttacaccgtgacgggtgcggagtacgaggcgatacacagttgctggtgcaaggctatcaaggtgctgccggactactccgtcgtccacaaacaggactggttcatcaaggaacgctacaaaccggagcttcagaaggacgacatgagctttttaagccgctctttcgagcgtcacttcaacgagcgtccgtacctgaaacacacctgctacctctacctgaccaagacaacaaaggagcgtaaccggatgcagagcaatttcagcacgctgtgccggggacatatcatcccgaaggagctggacagggaaaccacgaccaagttcttggaagcctgcgaacagttcgagcgcatcatgaacgacagcgggcttgtcaggctgcgccgcctctccaccgatgagattgtgggtactgagggaaagacgggacttattgaacgctacttctcgctcatgccggaaggtgacaccaccttgcaggacatcgagctttcggcaagggagatgcgcatcggcgacaaccgcctgtgtctgcacaccctctccgacgcggaagacctgccgggcaaggtggctaccgacacccgttacgagaagctctccaccgaccggagtgactgccgactgtcattcgcctccccggtggggcttctgctctcctgcaaccatatctacaaccagtatgtgctgatagacaacagtgaggaaaccttgcagaagttcgagaagtccgcccgtaacatgcagtcgctatctcgctattcaaggagcaacagcatcaaccgcgagtggatagaccaatacctgaacgaagcccattcctacggactgacctcggtacgggcacacttcaacgtcatggcgtggagcgacgatgcggaggaactgaagcatatcaagaacgacgtgggcagccagttggcaagcatggaatgcgtgccgcgccacaacaccatcgactgcccgacactctactgggcggcgatacccggcaatgcggcggacttcccggcggaagagagtttccacaccttcatcgaacaggcggtgtgcctgttcacagaggaaaccaactaccgcagctcgctctcgcccttcggcatcaagatggtggacaggctcacgggaaaaccgctgcaccttgacatctccgacctgcccatgaagcgaggtatcacgaccaaccgcaacaagttcgtgctgggtccttcgggcagcggcaagtctttcttcatgaaccacctcgtgcgccaatattatgagcaaggcgcacatgtggtattggtggacacgggaaactcctatcagggcttgtgcggcatgatccgacgcaagacaggcggagcggacggtgtgtatttcacctacacggaagataagcccatcagcttcaacccgttctacaccgacgattacatcttcgacgtggagaagaaggacagcatcaagaccctgttgctgacgctctggaagtcggaggacgacaaggtgacaaagacggagagcggcgagctgggcagtgccgtgagtgcctatattgagcgcatccaatccgaccgtagcatcgtgccgtcgttcaacaccttctacgagtatatgcgtgacgactaccgcaaggaactggcacagcgtgacatcaaggtggagaagtccgacttcaacatcgacaacatgctcaccaccatgcggcagtattaccggggcgggcgttacgatttcctgctcaactccacggagaacatcgacctgctcggcaagcggttcatcgtcttcgagatagattcgattaaagaaaaccgcgaactgttccccgtcgtgaccatcatcatcatggaagccttcatcaacaagatgcggcggctgaaaggcgtgcggaaacagcttatcgtggaagaggcttggaaggccctctcatcggcgaacatggctgaatatctgcgctatatgtataagacggtcagaaaatattacggcgaggcaatcgtggtgacgcaggaggtggacgacattatcagttctccggtggtcaaagagagcattatcaacaactcggattgtaaaatcctgcttgaccaaaggaaatatatgaacaagttcgaccagatacaggcgttgctcggactgacggaaaaggagaagtcgcagatactctccatcaacatggcgaacaacccttcacggctctacaaggaggtgtggataggcttgggcggcacgcagtcggcggtctatgccacggaggtcagcgcggaagagtatctggcgtacaccaccgaggaaacggaaaaagtggaggtttaccgtctggcggagaagctgggcgacgacatcgaagccgccatccggcagcttgccgaaaggcggagaaacaaggaataactaaaaaacagaatgtatcaaccaaaaaagaaaaacgcgtatgaatttaccaaaagtgaaaatgctgcaagtcagcaagtgccttatcggattggcggtcatgatgctgcaatcctgcgacgtggccgacaaccgccgcgacatgctgtgcgggaactgggagagcgtggagggaaaacctgacgtgcttatctacaaggagggcgaagcctacaaagtgacggtgttccgtcgtagcggtctgcgccgcaagctcaagccggaaacctatctcttgcaggaggagaacggcaacctgttcatgaacaccggcttccgcatcgacgtgtcctacaacgaggccacggatgtgctgactttctcgccaaacggggactatgtgcgggtgaagccgcagccgggacatccgaccgaagaataacaaccactaaaatccaaagtaacatgagaacaagaataacaatgattatctgcctgtgcctgcttttcgcgggcagggcaagcgcacagtgggtcgtaagcgatccgggcaatctagcgcagggcatcatcaatgcctccaaaaacatcatccatacctccaagaccgccacgaacatggtgagcaactttcaggagacggtgaaaatctatcagcagggcaagaagtattacgatgccctcaaatcggtgaacaatctggtcaaggacgcccgcaaggtgcagcagaccatcctgatggtgggcgacatcacagacatctatgtgaacagtttccaacggatgctccgtgacgggaatttcagacccgaagagctttccgcaatcgctttcggctacacgaaactgctggaggaaagcaacgaagtgttgacggaactcaggaacgtggtgaacatcaccacgctctccatgaccgacaaggagcgcatggacgtggtggaacgctgccactcgaagatgaagcgttaccgcaacctcgtgagctactacacgaacaagaacatctccgtgagttacctgcgtgcgaaaaagaagaacgacctcgaccgcatcatggggctgtacgggaacatgaacgaaagatactggtagcctatgaagttcgacaaccttcatcagattttacgttcactttatgagcagatgatgccgctgtgtggggacatggctggtgtggcgaaaggcatcgccgggctgggtgcgctgttctacgtcgcctaccgggtatggcagtcgctggcgagagctgaaccgatagacgtattcccgatgctccgtccttttgccatcggtctgtgcatcatgttcttcccgactgtggtgctgggcacgataaacagcatcctctcacccgtcgtacagggcacggcaaagatgctggaggcggaaacgctggacatgaaccgataccgggagcagaaggacaaactggaatacgaggcgatggtacgcaaccccgaaaccgcctacctcgtgtccaacgaggaatttgacaagcaactggaggaactcggctggtcgccctccgacatggtgacgatggcgggaatgtatatcgaccggggaatgtacaacatgaagaagagcatccgcgacttcttccgcgagatactcgaactgctgttccaagccgccgccctcgtgatagacaccgtccgcaccttctttctcgtggtgctggcgattctcggtccgatagccttcgccctgtcggtatgggacggtttccaaaacacgctcacgcagtggatatgccgctatatacaggtctatctgtggctaccggtatcggacatgttcagcaccatactggcgaagatacaggttctgatgctgcaaaacgacatcgagcggatgcaggcagacccgaacttctcgctggattcgagcgacggggtgtatatcgtattcctctgcatcggcatcatcggctactttaccattcccaccgttgcgggctggattatccaagccggaggcatgggcggttacggtcgcaacgtgaaccagatggcgggacgagccggaagcatggcgggcagcgtggcgggtgcagccgcaggaaacgcagtcggacgtgtcggcaaattgctgaaataatcaatgtgcaatcataaattggaaaatataaatggaattcaaatcacttagaaacatcgaatcgtcgttcaggcagatacgcctgttcggtatcgtcttcctctcgctgtgcgccgtggtgacggtgtggagcgtgtggaactcctaccgtttcgcagagaagcaacgggagaaaatctatgtgctggacaacggcaagagcctgatgctcgccttgtctcaggatttgtcgcagaaccgcccggcggaggcacgggaacatgtgcgccgtttccacgagatgttcttcacgctatcacctgaaaaaagcgcgattgaacacaacgtgaaacgtgccttgctgctggcggacaagagcgtgtaccactattattcggacttcgcggagaaggggtactacaaccgcatcatcgccgggaacatcaaccaagtgctgaaggtggacagcgtggtgtgcgacttcaacgcctatccctaccgtgccgtgacctacgccacacagaaaatcatccggcagagcaacgtcaccgagcgcagcctcgtgaccacctgccgcctgctgaacgcatcgcggtcggatgacaacccgaacggttttaccatcgagggtttcaccatcattgagaacaaggatttacagactatcaaacggtaacaggacatgaaaagtatcagaaaatcaatgtggggcatgtattggaaactccacgacaaacggaaacgcttggcggcaagtctcaaagggtatctggacggcttgccgccggaaacacgccgccgcatcgtgctggggatgttcgccgccttcgcggtgcttgccctttacaccttcggcagagccgtctatgacatcggcaggaacgacggctcacatatggaaacgggacacgccggacgggtggaactgccgaccccggcggaaacaggcaatcacttaacaccttatttatatggaacagacaaagaatgaaccgacgaaagagaacaaagctgctcccgaaacggggaaaccgaaaaaggagcgcgaaccgctgacagaggcgcaacggctgaaacggcagaagatgatcgtgctgcccgctatggtgttggtgttcatcggggcgatgtggctgatattcgccccgtcctccggcaaggagcaaccgccgggaacggacggatacaacaccgagatgcccgacgctgacaaggcgaaccggcagattatcggcgacaagctgaaagcctacgagcatggggagatggaagagcgtcaggagagccgcaaccgtgccatcgggcagctgggcgacatgttcgaccgcgagatagcgggaacggagaacggagtggacttcgacctcgccaatccgggcggcaaggaagaaagggcaaagccagccacgccgcagaccatccagtcctccgcagccgcctaccgtgacctgaacgccacgctcggaaacttctacgaccagccgaaaaacgacaatgcggagatggacgaattgttggagcgcatcgcatcgctggagtcggaactggaaagcgagaggggcaaggcttcctctatggacgagcaggtggctcttatggagaagtcctacgagctggcggcaaagtacatgggcggtcagaacggaggacagccatcggcggaacagagggcagagccaactaccgtgcagaaagggaagaagaacaaggcaatgcctatcagacaggtggagcatcaagtagtttcttcactctcacagcctatgagtaacgcggagtttgtcgccgccttatcgcaggaacgcaaccggggtttcaacacggctgtcggcacggcggaggtattggacaggaacaccataccggcgtgcgtgcatggggcgcagagcgtgacggacgggcagacggtaaggctgcgcctgctggagcctatggcggtggcaggcaggacaataccccggggtgcggtggtggtcggcacgggcaagatacagggtgagcggctcgacatcgagattacctcgctggaatacgacggcacgattatccccgtggagcttgcggtctatgacacggacggacagcccggcatcttcatcccgaactcgatggagatgaacgccgtccgggaggtcgccgccaacatgggcggctcgctgggaagcagcatcaacatctccaccaatgccggggcgcagctcgcctccgacttgggcaaggggctgatacaaggcacgagccagtacatcgccaaaaagatgcgaaccgtcaaggtgcatctgaaagccgggtacagggtcatgctttaccaagaaaaatattgaaaacaataaaaattaccactaaaatccaaaagtaatgagaaaagtaatcatcatgtttgccctcgctatgggcatcataactgccaacgcgcaggagaatgtaaccgttgaaacgaccaacggaagtgaacaaccgaccttgacgaaggaggtctatccgcagaaggaggcggacggcgacctatatcacgggctgtcacgcaagctgaccttcgaccgcatgataccgccgcacggtctggaagtgacctacgacaagaccgtccacgtcatttttccggcggaggtgcgctatgtcgatttaggctcgcccgacctgattgccgggaaagccgacggagcggagaacatcatccgtgtgaaggctaccgtaaggaattttcccaacgaaacgaatatgtccgtcatcacggaggacggcagtttctacaccttcaacgtgaagtacgccgccgaaccgctgttgctcaacgtggagatgtgcgacttcatccatgacggcagcacggtgaaccgcccgaacaacgcgcaggaaatctatctgaaagagctgggcagcgaaagcccgatgctggtgcgccttatcatgaagtccatccacaaacagaacaagcgcgaggtgaagcatatcggctgcaagcgtttcggcatccaatacctgttgaaaggcatctacacgcacaacggcttgctttatttccacacggagataaagaaccagagcaacgtgcctttcgatgtggactacatcacttggaaaatcgtggacaagaaggttgcgaagcgtactgccgtgcaggagcagattattctgccgctccgcgcgcagaactacgccaccctcgtgccgggcaaaaagagcgagcgcacggtcttcacgatggcgaagttcaccatccccgatgacaagtgcctcgtggtggaattgaacgagaagaacggcggccgtcaccagtccttcgtgattgagaacgaggatttggtacgcgcgggtaccatcaacgaacttcaagtacgctgaccatgagaaagtacatcgcaataatcatcgcgtcgcttgccctttttacagggcaggcgcacgcccagcggtgtctgccgaagatgcagggcatcgaggtgagggcggacatggcggacggcttcaatctcggcggcaaggacggcgggtacagcttcggggcggctctctccacctacacgaagaaggggaacaagtgggtgttcggtggcgaatacctgttgaagaacaatccctacaaggacaccaagatacccgtggcgcagttcacggcggagggcggctattacttcaagatactgtcggacgcccgaaagattgttttcgtctatgccggggcttcggctctcgccggatatgaggcggtaaattgggggaagaaggtgctgcatgacggctccacgctgcacgaccgggacgccttcatctacggcggtgcgctgacgctcgatgtggagtgttacgtggcagaccgtatcgccctgcttgccaacctgcgggagcgttgcctttggggtggcgacacacggaagttccacacgcagttcggggtcggtatcaagttcatcatcaactgacacgggcatggaaaggacggaaatagatgctgtcagaaggatgccgcttgcggattttctcgcacggctggggcatgagcctgtcagaaggagcggtaacgagctgtggtatcttgccccgtacaggggcgagcgcacatcctctttccgtgtgaacgtggcgaaacagctctggtacgacttcggtttgggcaagggcggcgacatcttcacgcttgccggggagtttctgcaaagcgatgacttcatgaagcaagcgaagttcatagcggaagccgccaatatgacggttgccggatgggaaaagcccgtctatctctcgaagccgaccgaatccgtttttgaggatgtggaggtcgctccgctgctccgctcactgctgacggagtatttagaggaacggggcatcccttacgccatcgcatcccgtcactgctgccgcttgaactacggtgtgcgtgggaaacggtattttgccgttggctttccgaacatggcaggtggctatgaagtcagaagccgatatttcaagggttgcatacctccgaagtctgtatcactggtaaaggcgaatgacatcccggctgacgagtgcctcgtgttcgagggcttcatggactttctctctgccgtgacgcttggtgtaaccggtaacgctgactgtcttgtgctgaactcagtcgccaacgtggagaaggcggcgggattgctggacggatacgggcgcatcggctgcttcctcgaccgtgacgaagccggacggcggacgcttgccgcacttaccatgcgatacggggaacgtgtcaccgaccgttcctccctctatgacggttgcaaggacttgaacgagtacctgcaactgacaacgaaaaaacagaaaaacaaccatctaaaaatcgaagaacaatgaacatactgaacaacagaaacaagagaacatcaatattcaaggcagtggcgttatgcctgatagccgccatgtcattcaccctcgtgtcatgtgacgatgacatggacatccagcagtcctatcccttcacggtggaggtcatgcccgtgccgaacaaggtagtaaaggggcagacagtggaaatccgctgtgaactgaaaaaggagggcgacttttcgggtacgctctataccatccgctatttccagttcgagggggaaggctcgctcaaaatggataacggcatcaccttcctgcctaacgaccgctacctgctggagaacgaaaaattccgcctgtactacacggcggcgggtgatgaggcgcataatttcatcgtggtggtggaggataactttagcaactcctacgaactggaatttgacttcaacaacaggaatgtaaaggacgacgatcttaccatcgttcccatcggcaacttcagccccttgttgaaatgatgcgtgtattcatgacaatgctctgttcacttctgacggtctgttctgtgtccgcgcagatcagccgccaagagggaacggacgggcaggcggcaatctaccgactgccgcttatggaacgtgcttttttatgctgccgctactttgaaggctggcactcagaaaaacactacccatacgtcggttggggtcacaaacttttgccaaacgagaagtattcggcacgaaccatgacaaaacgggatgcggatgaacttttgcggaaagacctgcgcaaatttgtcgccatgttccgtaaattcggggttgattcgattttgcttggcacgttagcttacaatgtgggaccggcgaagctgttaggcagcaaaacaatccccaaaagcaccttaatcaagaagctggaagctggtgacaggaacatctaccgtgagtatatagccttctgcaactacaaaggaaaacgccacgccatgctgctcaaacggagaaaggcggagtttgcgctgttgtatatcccataaaaggactgacaaaactggcaaaagacgtgccatatttaacttggcacgtcttttgctctatcacttgatagattatcgtaggattttctcgttaattgacatcgttgagccatttttgcctatcggtttccaaataacacttcaagttgtaagtgttgtgagagcaatacaaaacatagttattaaccataaaaagtatagcgaaattatgaagaaagtatttaggaaaattcagaaaggaacaacaaaaatgattgaacgtatcaaatcgttgggggaaatggagacgaagcagaaatgtgtagttcaacggttcgagattatcattcccctccaccaaaaaataacgacccaatatatagcctccgcaagttttacttgcggattttttagttatcgcagattggacaaaggtttctttgctacttatcaaaactaaatgattattacaagaacacattttatttatctgaaaatcaatcagacttttaataatattattgtatattgttcattttgattatatggcaatatcgccgaacttaaaaaatcatacacaatgaataattgcaaatccattccacgcagtgagttcttcatttactgcaaaagagcctttgagagtttcaaactgtccacctacatgaccgacaggtatttacgttacatagaatacatatcccaatacatggaggatatgggtgttgattcttacgatttgaatttcagttctgcttttcaagaaaagatagcaaaagctgataattctccaaatcagcgaaaatcaagggagtattcttgtgcgttaagtcttatagacaggttcattcaaggtttgccgtatgccgcacagcgaaaaaaactcaagacatacaatttcccgtccaatgaattgggggattatgcaaacaagtttattgaacacataaaaacaaagaaacgtaagaatgttacattattacgctatcagcattcaatgtcaaatatcgtaaatggcttatccgaaaaaggctgcgattctccctcgcacttaacccgaaccttgataattgatttgattgcttcgcatagaacagccgacaactggtatttctatctcataaaccaattcctgaattatttggcagagcaagatgtcattcctttggtcttggctcatgtaacatatgggaaaaagcctccaataccaaagccgttaccatcatattacacagcggaagaagtaaagaaaatagaaatgtcttttgacaggggtactttgctcggtaaaagaaattatgcgatgattcttttggcttcacgtttagggttaagagcatcggatatatgccagctccaattagatagccttgattggaagaacaatagaatcaaaatcctccaaagcaagacaggaaaagatttggagctaccgttgttggcggatgttggtaatgccattattgattatcttaaacatgcccgtcctaaaacgaaaagcaatatggtgttccttagccaagtagagccgtacagaccgatagccacagccacactttccggtgcggtgagcaaagccattcacagggcggggattgaaacaataggcagacatgtcggtacacatacgctacgccatagccttgccacatcaatgatgaaaaccggaagtagcatacaggctatttccgaaacattggggcattcgggtacaggagctacaatggcataccttaacgtggacattgactctcttatggaatgttcacacgaagtacctccggtagataagtcctattatacacagaaaggaggtgcattctatgtttgaagttaagttgaaatctcactcctcgctctatccctatatgcaggactatatccatgaacgtgaaataaagggaatttgtacgggagaagcaaaaaccatactaagtaattttgaatgctattctgcgagtgttggatatagctgtgaacatatttcacgtgaacattatcataattggattgacagtcttgagggtaatgaagcacacaaatccttgtacatacgtggtgtaatactgtttgcaaagtatttgaatctgagaggtaaaataagttttgtaggtatgcatccaccttacaaaagcgactttacaccttatatttatagtgaagaggaaatagccacactattctcaacggtggacaaatggcgagactatagtatcaatcccggttctatagcccttgtcatgccgacattgttaaggttaatatacagtacaggcatgaggattggcgaggctttaagcattaccaatattgatgtggacttcacaaggcattccatctgtttgagaaaaacaaagaacaaccatgaacgctactgtgcaataactccaacaatggagattgtcataaaagaatatataagatacaggaacatgttaccagtggctggagtcgatgctccacatgctttgttgttttgcaacaatattggtggtaaggtaaatgcaaaagccgtcagagtcagattccataatattctaatcgcttcgggattcaaggttacgccaagtggatatctgccaagaatccatgacctgcggcataccgcatgtgtgcataccatgaaaaagatgatagcggcaggtaaagacatctactgctgtatgccgcaacttgctgtatatatgggacattgtgaccctaaagacacggaatattacttacgtttgacaccgacagcttttcccgaactattggctatggacgcaaagacaactatgccaataactgagatagtgaatctttttttatcaaaacaaaaagtataaagaaaatggatacatataaaaatttcacgaggtctcttgaagcattttttcaacaatacctcatcaaagaacgtggtgcaagccagcaaacggtaagagcatacggagaagcgttcaaggcttatcttgaatataataaaaccttggatatcaaaccgcaaaatataacactgcggaactttacaaggtctcacatatcaagtttcctcaactggatagaggaagaaaagaaaaactctatcagcagcaggaatcaacgtttgtccgcaatgcgttcctttgcctgttttcttattatggacgaccccttgcatatctgtcagtggattgaggtgagacaaatacctgcaaaaaggggagcaacagaaatcgtcaagcacctctctgttgacggtatggctgcaatccttcggcaaatagacacatcaacgcccaccggaagacgaaatcttgcaatgctgtccctactttataattcaggaacaagagtacaggaacttatagacctcacgccaatatgtatcagatttgagaaaccgtattcagttgtggttaaaggaaaaggaaacaagaaacgtttggttcctttggatgagccaataatggaactcctaaagaattatcttgatgaaactgggttgtgtcgtccgggaaaagagagacatcctctttttttcaatgcacaaggtggacaactatctactccgggagttacttacatcataaaaaaatacgcagatatggctcgttttgacaatccccaactgattcccgaaaaagttagtccccatgtttttaggcattccagagcaatgcatctgttacagagtggcgtacagcccatctatatacgtgattttcttggacatgtttctgtccaaacaacagaaatttatgctcgtgtcagcaggaagcaaaaagatgaagccatagccaatgcttatcgggacgtaggaattaagaaccccgaacctaaattatgggaaaaggatgatgaacttcttgattttctaagcaatctttgctcgaaaagatagaacggaaatattatcacaagtgaaattataaagttgtcttagccatatcttgactattaatagattaagacatacgattaatgccacttgtgataatcatttagttttgataagtagcattatcacaatctttttataagcctactttctttgtccgccatcatgctcactgaaagaaagtagggcggctctcgccgccccgccactcaaaagcgtgtgtaaagtcccgtcaccatcgtgaacatttcctccagcatatcaaaatagataccctcgtgtacggcaatgtcctttgtcttgcactcaaaggtctttttgctgaacgtcctgcggtagaagcgcatattgtagaggtctgccccttcgtcatagatgatgtcaaggcggttggcacttgttttgttccttgcaaggctcatccgtaagccgttgcccatatctatgaaatcacggctacctgtcatggcggtgaagcgttttccgcctatctgctgtaatatcgtcttggctatcatatcttttgtttttagggttttaagtattggcggtgcggacaccgccatcccgttcaaaattctcgcatttcggaaatgggggtctgccgttgtagccactctttcacacattccatattgtactcgctcgtgatgactgccgtatggctgtcggtggcggtgaaacgtgtgctttcgtaatcatctatccaccccttgagggtgtccgttccccacgctccggtatcgtcaaagataccgtccaatgccgtgataggttcgctgaacttgactatcagcgtttgataggtcgtgttcatagtctgtcctcctttcccttctttgcgttcagccacttgtcccgtgcggctcggcactcgtccaacgtgggtttgacacaagagaacaattctctgtctatggggtggcggtagtcgtactgcacaagtgtccgcctgcgtcttccgatacccgattggaaacgctcgtatttctccgtacctgcttccgcgcaggtgcttactccgttgatggtcattcgtgttgtcataatgttgctttttagatggttaaaaatgtactgacagaactctgttcttcatcaccatttcggggttgcttgtgtagcgttggtgcaggtagaaatggtgtgagccgaagccgtaaaggaaaaacttgtcaagttcgtgcttctcggcaaactcctttacgctctttctcaattccccctcactcgttgtgagagtgaggaggttcacaaattcaaggaacatcgtggggattgcatcatcccacacacaaatcatactttcaattcttacttccatatcaatgttgttttaggggttatgctatgccgctttcatccgctcacggataaggttggcgttcttgttcacaaggtctatgatgcgctcgtgatattcggtgtcctggttgtgcttgccgtggcactgcaccacttcgagggttcgcaagtccacctctacggtttcaataatctcatcgccaatccttgccgatagtatgagggtgtcggctttcttgtagtatccactgccaaacacgcagatgccctgcgtcttgccctcgttgtaatactcgtctatgctttcaagcaccttgacgattatttcctcgtccgtgattaccaagccgaagaatttggatttgttggcgatgaaatcctccgcatctttctttcgttggagttgtcgctgttgctcacgctcacgcctttcaatctcccaacggcgttgctctgcggctctttccttctcgtgtatggcttcaatttttcgggttgcgttgtcgtgtgccgccatgaaatcttcgggacagatgttcttcgggttacggaggtcttgaccgagttttttgagcatacgcagatagtcgcaccacattgagaggttgtctatctgatacttgtgacgcttggcaatcagatatgatgcccaacattcatcggcagtacgggtattgaaaagaaagtgtttcatgacctcaatctcaccgcctttcataagggtttcaattcttgggtctgaaagcaaggctttgaaaagacgcacgggggagatgccgtggaaatcgcccttgaagccgttacgtctgagttggggcaatatcctcatctttggatatgcacagcttcttgccaccacatcatcgtataggctgttgtgcggtcttacctccatatcgctgcctaatgcccacacatcgcaatagcagaaaaggaagccacggagcaacgccatgtccgtaaccttgccgtcgggtgaaatccaacgctgcacgacctcgtggcagtagaaacgcatcggttcgcctttcctgctctcgcatctgacctgcgccacgcggattacctgataccctttgcaggtggttatcacgctgaaattctgcgtttccttgtagatgcgtctgcgtgtgtcctgcactttgagttcggcatggcatttggggcaggtgcagccttcaagggtgtcgcatagtccgctgtcgctgtgccactcgtgaccgcagtcggaacaggtgatgttccctttcttggtgcggtagccgatatgctcaacgcagtggcggtatgcccaatctatttgtgtcgctgatatggggcgaaggttggcggaaagtcttgccacctctttctgtatcttggtcttcggtttcataagcctaaatcaaataatgagggttggggttggttttcttttctcgctgacggtctgtggcggttctgcaacttgcggagttcctcctcttggtatttgcggacagcgttctgacgtgcctccgccttttcctctgccgtgagtttcacaacgtggttcacaaccacttggcagtccatcggtttgcccacctctatctcgttttcctcatagtagtggatggcttgcccgaatatctctccgtccgtgaaaccgttgcaaccgcttttctgcacatagttcagaatgtgggtcacgcactcgtccatgttcttggcagggttgcggtacttctttgcaaatagcgcatcttcctccgcacgctgttccaagtacatatatatcgttctcttgaaatggtctgttcctttcatatcgctgtcatttttagattatctgtttcagtatctctctccaataggtcggctctacctcgctgagaaggaagtccatgaaatccctccgtgcgtccttgttcagttcgtggtacaatcttcggaaagtttcaaaattgccgttgatgtacgtttccaccatatacacgaagatgttgtccacctcgtaatatctgcactgctgcgctgccgtcttgctgtttctttttgccatgtcggtaagggttaaagggtgaataaccaaaggatgaagccaaagaaggcaatggtggaaaggatagccacgattacacctatcgccactcggaacactccgtttacaatctctctgatgatgccccaaaggatgccgaacaccccgaaggcggtgcgcatcatcaagccgcatatcgccaacccgatgtgttgcgccatttgtctgaaatttgccgttgccgtcatatcttcgctgtttttgatttttttgtttttaatgcggattcaagagctgagggagttgagtttcaaactatcttatctgcctctcgtttatccgacattttttttatgcgtctttctgtcgcatcggtcgttttcgtttcgggtgcttgaaaaggtagggattagggaatgcaaggtttttcggtcaaaatactacccgcagggctggagatttttaccgaaaacaggaggcttgaccttgctttcccgtccaatcccggaattacctttgcgcccagaacgaaaatgactgactgatgcggcttactgaaaggcgcaaaatggaggtaaacgaaaacagaggcagattgtgtagaaaaaaacttcaggggaaaatccgtaaaaaaaagaatcaccaaaaggaaaaagacatcaccggaagcgtgaaaagggcaaaccacaacaaaggaagtatgattgtttccgatccgacggaacttgttcagccgggtggcaacaatcattcttcccggtttgtccggctgtgtgtgggcgcctgtttcattcatggggcaggctgacacactctgcattcactttccgcttccggcaaaagagacagcgaaaaaagaaaaatcatttgaaaacccgtaaaagcacctcttggcataggcgcaaaagaaaggggcattgcttcatctgtctaaacatcgtttaggcgtgaggcaatgcccttttctccagctatgcggtagtcggcacacgtttgttccaaactcgttttgggcaatggtgtgccgacggacaataccgcttttacggaaaattcttatgaatgaggggataaaaaacgggagtttatatcaaaatctcgaattaaatagctacttttgcatacgaagagttctttgaaggttacgcaacgcgcagaaggataatgcagtagataactaactaaatcgtaacctattactatcaagagcaattaacctacgctcatttccaataaattacactcttttcgtaacttcggactgcaagtatccgaaacccgccgtgaactccacgttccaacggggcgacacgtataactgataaccataagagataccgccgccataagcgttaccgttataactattctttttctccatcccatacaggagcttcaaaccggcgaaatcgtaatccatatactgggcatgaaccccgaagaaatgtccgttgaaacgctcgtgtatccagtagcgcacctctggttgtatcacccaatgcttaaaggacttatcgctcgagaatgtccaaccgttataataccccgatgcctcaaccgaccaatgcttgttgaacgcgacctccgcccctacgttcggcgtagtgatcgcgtcataaagcacattggtcttcacggccacgacctgtccttgaatatccataaaggttgacaaaagaaatactaacagtaaatatagtttattcatatctcccggttcattaggtttgtttatttaagagacaaaaccgtacaaatatagataatatttatcagttcattcgtacgttaacttatataatatccacgatttacaaacggaaaacgttatctttgcaagataaatccagaatatgactcatgaaggctaaatatatcgtgatttttttcctgtcactcctttcgtttgtcgcttgcgataaagaggaggtcgttatccctactaccgcccctcgtacggttcttatctatttcgcaggggataatagcttgagtggatacgtgagccaaaacctgagggcgataaaggaagggattgagcgagatggattgaacaacggtaatttgttgatctatacggataagcagaacgaggctccccagcttttccaattaaaactggaagcggataccatccggcagatcgtgctcgagacctacgcctcgaaccagaactcggcctctaccgagacgctgacgcaaataatcgacaaggtacaaaaggaatatccggcggatagttacgggttggtgctgtggagtcacggaacgggatggctaccttcggatatctatagctatctgcgttctttcgggcaagacgggaagaataatttcatggagatcaatgatttggcctccgctttatcgaagtatcattttgattttattttgttcgacgcttgttatatgtcgtgcgccgaggtagcttacgctttccggggatgtgcggattatattatcggctcgcccacggagatactggccaatggtttcccctatcaaacgatcatgggggatatgttcaaaaaagaagctgatgtggtggggatagcgacaaagttttatacgtattatcaaagtgaggcaggaacgatctcggtcatgaaaagcgatgagttggatgaattggccgctacttgccgtaccctattccatgataagacggaaagtgatcttttcgccgtacccgttagcgaattgcagatcatggagtatttgacgccgaattatcatgccttatatgattttgatgattacgtgagccgtctggccacggaagagcaatataacgcattcaagcggagcatggaaaaggcggttatttacaaggctactacacccaaggcagtttacgcttatccgtatccgtatggaagctatctgccggtcaataaatatagcggcttatctatctacgtcccccaagaagccttgcccaaactgaacgagtggtacaaggatcttgagtggtataaagcggtctattaatcaccccttatccaacgctttccgcgaggagtgtgaagaaatagtaagatactccctgctattgcagcaacaattgtaaaaaacacagccactactatcatactaatctattttaagtattaaacttccaatatatgcgaaccatacggtagcaactaagccaactccaaaaatataccaaatgatcaaaggtatagtatcaacatatgataacctttccctattacctatattaaagaaagctccacctaatcccaacactaaagccgcaaatgtcaactttgacaggtcaaagaaatactttgcgatattctccttccgtatcttcactaactctcgcgcctctttattcttttctctccttctttcaaaatcactcatgacaaaaatagtatttatatttcacatcccattctatttcactaggaaaacttctttataacgttcaatttttccttgaggatgaacaagttccgcatagaaaatataaacgcctgttctcaccttggaaccattcaccgcaaggccgttccaagtcaattcaccttctatccctaataagtcatgatttaccacctcactgatacaccttccggagatatcaaatatccaagctctacaggtatagccggattcatctagatggtaagagatggtatattctttcgtcgcttcaaagtaaacgggaggctctatgcccgttacctcgccttcatcttgctttccatattgggaattccgatagccgggcgtaccgtatcccgccgtggccgaagccgaggtccaattcatctcatcctgcgtatcgctatcaggattaatccgctccaaggcaatccccttctcgtttttcacggatggggcatgccatttagaggaataacgaatctcatcgatcataacctcatcttctgtacgaaacaggactaacgtagcggaggtatttgccaagaccggaagttttaattcatgcaaagcatccggcgaagatatcagataaaaatcgctcactcctcccatacttttagtcagcaacgcataatcttgtggttctaccggagagactatagaagataaaggataatgcgaactcaatgtaccatcggatttacgagtagcaacagacagtccggccaaaggcaatgtccggtccgaacgattataaagctcgatatactcactcccttccgggtaaggattcggcaacaactcattaaaaacgatctcattgggtaagactataatgtccgtggggatacccggtttatggggagcgtccggacgatctggatcttctggttcatcgtcaggagaagagttcgcggaacccggcgtgcctcctcgctcatccgttgataaatgaaagccggtttcagaacgttcccaagcgataccggctttcgctttctcataggcaatccggtcgatctccttaccggaaggatcgaataaagcaagctccttccccgtgtttaccaacgacgccgggaatttatccaagggcagatccagccccgcatcatcaatatgtatatccctaccggaccgataaagcacgacatatccatccgcatccaaaaacaaagctgtcaataccgttggcttactaccatataagaatgaccaaccatttaactctatagccttatccgtcgtattataaagttccacatactccgtttccggaaaagccttttgtcctttcggatcagccatcacctcattaatacggatactaccagcggggaaagaaggagtatccggcacttccggttcctccggaacgtcgggctcttcttcatattctaaccgaatctcggtagaactctccggaatcttatttccctcaagatccattaaccccgagcacaacaaatcataacccatgccaaccttcaactctttatcaaagctgatattcacatagatccgcatatcatccgcataggtcatacgagaagcattaccgatacccgatatagagaatatcgcctcacggatatccaccggaagattatattgtaattggaaaacagactcggtgatcggttggatagcaagaagccgcggaagaaccaacggctcatcgggctcattgggttcttctggctcttcgggagtatccggcttctctggttcgatcgagatattatcggatataatgatgtagttacacgcaaaatcatttactcgagttttagaatagcggcattcaaaacgtagttgtccccctttacatgaagaagaaacttcagactcacaactccctatcaagacaaacctacccttctctagcacatataagttccatatcttatgattttctaaagtaagtttcactttcaaatccacggctcccaacaagacatcgagcgctttctctattaagatctttggattcttctccgttgcggtatgtttccgaaaagttatcgttttcttattactgccgatttggacataataatcgttttttaatccaagcatcctctgatcatctaaataaacatgtagccggatatggttttgatcgcttggtttgaaatccatccgaatctcaaattcccattccattgtagcggaataaacgagaggagtttctatggaaacacttttccgggtaggatccgcacgtgagaccagccatccggtctcaatcacaaagcaatctaaatcacccgtccaagggttatccgatgtaatctccagtccattaaacggttcttttaactggggataagcgcaaagcggaagtaaaaacgcaagaattaataataattgtttcatagctatatcgttttagttataaatttctctatctttgcaccctaataagttacaactgtaaataatagggcgcaaaaggcaaaaatatgaaagccctttacagacagcaaagttataactattttacattattcaaattaaatcagtgctcaaaatgaaagtagcaattgttggtgtaagtggagccgtgggacaggagttcctgcgtgtactcgaccagagaaacttcccgatggatgagctggaactttttggctcatctcgtagtgccggacgtgtttataccttccgtggtaaacagtataccgttaaggaactgaagcataacgacgactttaagggaatcgatgttgcttttgtttcagccggaggtggtacttccaaggaatttgagaagacgatcacgaaacatggtacggtgatgatcgataactccagcgcgttccgtatggacgaggatgttccattggtcgtaccggaagtaaacccggaggatgccttgaatcgtcctcgtggcgtgatcgctaacccgaattgtaccacgattcagatggttgtagcgttgaaggcgatcgagaacttatctcatatcaagcgtgttcacgtatctacttatcaagctgccagtggagcgggcgctaccgctatggctgagttggtaaaacaatatgagcaactattaaagggcgaggagcctacagtagagaaatttgcttatcaattggcatataacgtaatccctcacgtagacgtattcacggaaaatggctatacgaaagaggagatgaagatgtataacgagacccgtaagatcatgcactcggatatcgaggtgagcgctacctgtgttcgcgtaccggttatgcgtgcgcatagcgaatctacttgggtagagacagagcgtccgatcagcgtggaagaggctcgcaaggctttcgccgaggctgagggtgtggtattgcaggatgaaccggcaaacaaggattatccgatgccgttgttcgtagcggatcacgatccggtttacgtaggccgtatccgtaaggatatcagcaacccgaatggtttgacattctggaccgtgagcgaccagatcaagaaaggcgccgctttgaacgccgtacaaatcgccgagtacttgctaaaggtgggtaatatcaaataacagacaactttgtaaattctatatacgtggaagcgggatcaagagaatactcttatcccgcttttttatgcttagcgtaattcctccatgccttctcaaaacgtataaatcaatacgcccaatacccgatggttggttatcgaatgtgtgtcatgaatccgtccgccatcttgcaaatccacattgccataccatgcgatggaagggctatattcaacacctaatttccagtgcggaagattatacgaaagttgcaggttggtcgtaaatacctgatctacgtccagacctacgccataggttttgcctaccagtgcctcattcgctcccaagttcttcaaatagcctaagaacaaacccggtttccatttctttccgtacacgatattcaaccaagaagtagagaagagatacggcgaatattcctgttcgccggtacgtgggtcgatagaggtgacgccgtaaccacccaacatacaagtctgcgtcaagttagaagccagcaaggttttcgccatcaccaaccaattcgcgtcctgatatttcacgtgcgcctcgccggatacggaagaaacccgctcgctgactttataaatcttgccatccacctcgttctgcgttctcggcactaacgacaagatttccataccggctcctacctgccaaccgggtttcttataatccaccccgagatagacttccggcacgcaactattcttgatatattcctcgctctttccgttcggtccagccgatagatattgcaactgccatagaaccgacccggtcaattgccacccattgtccgtataacgataacgaatttgcgggctgcggttaaagggctggaacggggcgccggtagaaagattcaacatctgtggaaagacctcgccaaatagcggatgccatgtctgtccgatcaagacagcggacttgccccaatccagattcacataggcatgacggatacggagcaccgcccaattgctacccgaaccccggaaatcggcctccagtttcaaggaagtcttggccgaaccaaccttcggtccttgtacatcgattcccaaacgggagtaaagcaggtaaaaactaccgttcggactagcgttcaagtccttgccatccgcatccaacgccacgtccttcggatataggtggaacaaaccatccacgatctcggcattcgcacgggaattatagaacaagtctccacgtacctgtccgtaaaatttgtaagagaagtttttcttttgcgcctgtacgcataccgccatacataggccgatcaaaagaagcaagttgcgtttcatttccattccggtcaatctatctttaaaaataatacatcatcaaacctaatatacgatgattcgttatcgcatgtgtttgctcgatacgtccgctctctaagtcggtcgtgccataataagctgtcgccggacaatactcgaaaccgaacttccaatgcggtaaattatacgatacgtttaagctgacggttattaattgatcgatatccaatcccataccatacaccttatccgctgagaccaaggacttcccggttcccaaattcttcgtatatccgacgaaaactcccggtctccatttcgttccgtaggcgaaattcacccatgtcgtagaatggcgaaaaggcgtatatccctgttcgcccgtacgggagtccaccgagctcaccccgtaaccgcccaataaagcggtatgatccaaggctgaggccatcaaggttttcgccgcaaaggtatagtttcttccgctatacttcaaatgtgcctcgtaagagaatgcggtcattcgctcgttcaccttaaaagtttgctccttccattccgtggaagtacggggtttcaaggagatcatatgagcgccgagccccatcaaccaaccatccgcaggggtaaaatccgcccccacgaacatctccggaatgcagctattcttaatataatcctcgctcatgcctttcggtccgctggaaaggtattgtaattgccacaacacggaagccgtcaattgtacccggctattcgccttatactggtaacggatctgagggctacggttgaaaggctggaacggcgctccggtggaaagattcaagacatccggcatcacggcgccaaacaagggatgccacgtgatccctactaataccgccgattttccccaatccaagtttacgtatgcctgccggatacgtaacatcgtattactaccggaaaaaccgccaaagtccgtctctatcttagcggaggaacgagccttgccaatgtcgggacccgtcacgtccaagcccaagcgggaagtgaacgtatagaaactgccattcggcgtggcgttcaaatccttgccatccgcatcaaaactcttatccaaaggatagagataaaagttcccatcgatcggagccatattagcccgggaattgtagaaaagatctccacggacgaagccgtagaatttgtaagtgaagttttttctttgcgctgtcgtagaaaataaggctagcatccccacgagcaacagggtaatccgtctcattataattcagtttgttatttttcttaccttataagccgcgaatgtatatatttttatggattcaatttgaagaaacgaaatattatttgttcctttgcttccaagttgtaagccttaaaggtcaaattagattaatattgtaaacaccagataaagaaaatgagtactaaaaagtttttgctagaagaaaaagatatacctacggcatggtataatatcgtagcggatatgaagaacaaaccgctgccgatcttaaatccacaaactaaacagcccttaaaggaggaagatttatatcctctattctcgaaaggcgtctctcatcaagaaatgaacacgacagacacatggatcgagatccccgatgaagtacgcgagctttataaggtatggcgaccgactccgttggttcgtgccactggattggaaaaagcgctggatacgcccgctcatatctatttcaagaacgagagtgtaagcccgatcggttcacataagttgaattcggccttggctcaggcttattattgtaaacaagagggtacgacaaatatcacgaccgagacaggcgccggacaatggggtgccgctctttcttatgcggcaaaagctttcggcttggaacttgccgtttatatggtaaaggttagttaccaccagaagccctaccgtcgttcgatcatgcagactttcggagcacaagttgttgcctccccgagtatgagtacgaaagccggacgtaagatcttgacagaccatcctaattatcaaggtagtctaggtaccgccatctccgaggcggtagagctggccatgcagacaccgaactgtaaatatacattaggtagcgtattaaaccacgttatgctgcatcagaccgttatcggactggaagctgagaaacaaatggaaatggctggcgagtaccccgatgtcgttatcggttgtttcggtggtggttccaacttctccggtatcacattcccattcctgcgccataaactaacggaaggtaaggatatccgggttatagcggcggaaccggcatcttgcccaaaacttacaagagggcaattccaatatgacttcggagatgaggctggctataccccgctaatcccgatgtttacgttgggacataatttctctccagcgaatatccatgcgggaggtttgcgttatcatggcgccggctccatcgtcagccagttgatgaaagacgaattgatgagcgccgtggatatcaagcaattggatacctttaaggccgctactctattcgcgcaagcggaaggaatcataccggccccggaatcatcccacgctatcgccgcagctatccatgaggcagagcaagccaaaatcgaaggtaaacctcgtacgatcttgttcaacttatcggggcacggcttgatcgatatggccgcctacgaccaatatctatccggtgatctaacaaactatgaggtaacggatgaggaagtagctaacaatttgaaagatttggagaaaatcatctgataaaaacaagaaaaggggcgataccaaatcgcccctttcccctatttgtctatgaaagtcttaatttaaagtatgtattatgagaaaatttcttcgtaattagtactcgggataatcatgttctggacatttaagctaaagtttttctttttcttatcccacataccgtaatttgtctttatctctccactttgatcatcatattgataagtgatctgatagaatggaacccattcatcgtttgtccgatcccaacgaaacgctttcttctcggaaaccttgccgttctcgttgtactggaactcatatcttacctgtttgttcaacagtccgttttcctgtaagaataccactttagagataatcttaccattctcctcttttgtatcatatagataatctttaggagacgctgcgcttatcgctaaactacacatgaaagtaaaaacaagcgcaagaatacttttaccccaaactgatgtcttcatactattttaatttataaggttactatcattttgtaccgcgaagtaaggaagtttcccgacaatcaccaaaagcaaagtgacaaatcgttagcaatatcacaatatttaacacattcaagaccttcattcccttcgattctcccatgtttactgatatattgtaaaccaaatcgtaagttcccccgatttttaaatatctattatttaccaccagccggatgtaactttcaaaagaaaactttagacaccgcttttttaataaattaaaaatctattgattaataaatatattcttacttttgcaaaggcagaatgcaaattgatttcttgacatgcgacaaataatgaaactatttatcacatcctttctttttatcctattctcaggatgtacaaaggatgtatatgatccttccgataaaattccgggagaaggtactaatccattctcaaaggtaacaatttcctctaatttcgattggtcgatgatacaaatatcccaccttaccgtacaatctttcgacccctatgatggcacctataattatctggtagaagtatttgataaaagtccggaagatcaagatgcgaatcttctcgctaccggggtttgctcaaagaaaacgcttttcgataagaaaattatctatccaaagggagagtcggatcaagtttacataaaattgacgacccctaccggatatcaagttaccgctcctgtcaccttaacaccgggtaatgataatgtctgtgctttcgattcgttagccgtatcgcaggaaacaaccgctactccggttagccgtaccccgacccgaagcgtgtcttccacctatacatttataatagaagactctttccctaattacggagattatgattttaatgatgccgtgataaaagtccagatggaaacttccatgaaagacgattatgtacaattcgccaatataaaactgactttccgtgcattaggcggaactaagcgggccggagctttcatccatctccccggcataaagtccaaagacatccaaaaagccgagttaaatggctggaccacgactccagaatcggaaaccgagactccggtttatgccctatcggatgatatacatggattattctcttttcatgaaatgattaatacagataatgaccttccatataggggaaagcaagaacgtttgatcaccttttcgttcgcagccggtgccttaaaagatttgaccattgatgacatcgatcttttcacgaccgtattaaagcgggaaggagaggtcttacgcacggaaatccaccaacgtaattatagctatacccccaaaggggtcagataccgttattactcaaatgataattgcatatgggccttaatgataccggatgatttcaaataccctgtggaacatgcttttattggtgatgcctatccggatctattgaaatgggtaagtggagatagcaaacatgtacaatggtataaaagtaagaatacggttgataagtggatttatacccgagaacaataacaacctaaaatcctccgtaaaatgaaaacgaccgccatcttatttcttgcctatctggctttatgcgttcagtgctcagtgccggaaaacaagagcacgaaaaaagagattagtactcaaccgataaaggtgggtgtattcgatgggcatggaggagcacagacctgtatttgggaaactgtcgccgctatccggctggacccggaaatggaggtatgtaccattactacagcagatatagctaataatgtgctcgattcgatcgacgctattattatcccgggaggaagtggcaaaagtcagtacttaaacctagggaccttaaatcaacaacgtatcaaggacttcatctctaaaggtaaaggggctgtcgggatctgtgccggagcctatctattctcgaatactcccgattacacctgtatacagctaaatggacagcaagcgatcgacatcgagcatgacaaccgagggcatggattagcgaaattcaccttatgcgaggagggtaagaagatattccccgaattagccgaccgcgatacgagtttcgtcatttactatgagggaccggtatttataaacaatccggctgatacgatccaaagcaacacgcttgccatcatggaaagcgatgtgcatgaggaaggaaacgccccggctaatatgacaaacggtaagccattcttcgtagccaataactacgggaaagggcgtgtttttagttccatcgcccaccccgaaggtactcccggcatgatgtggatgatcccccggatggtacgttggaccttgaataagccttttatcccttatcaatcctccgccgtacgtccagacctgttcaatcatgaatcattaatggctaccgatgatttaaagcaggaagaaaaagcctttcaaatccttttaagcggagaaagcgagcaaaaggttgccgccttggattggctggaagcacatcattcatgggacgccaaacgatgggtacaaggattgctttatgacgcttcacccgccgtccgtatccgggcagcccggtatatagcggatacccattacttacctttcttacccaacttacaggcggcctaccggacagaaaccgataaggcgacccaagaagagttaaagacgcagctggagaaactaacagccctacttccttaggctagggagatttaaactctccctagatattcatctaccgtatagtttaagaaacgattgaatggtaataacaatttaaagtcatccaccgccttatccatccaattcttagcgtaaaagaaattatccggcttataagacaccacgctgaaatccttatgcttcatgatataaccataaggggaatccattggatagccggcaggcatgcgtttctgcatctccccctctaacaccggaaatgttttcttaaatgtaggttcctcgataatagccgtaaattcctcgatatgatcgtatatatcctgacgaagtttctttaatagcgcaggtggcgggcaccatacaccaccggaaagcaagcaacctcccggctccagatggatataataaccaccccgttcgctggcacgaccaccttgggagatgtaagcggcgaaatgacatttataaggagtcttatccggagagaaacggatatccctgtatatccggaacaaacaatctttcgcctccaacccggctacctcgggatcgaataaagagatacgaccgattaaatcctgtacctcatcgataaaaaccttacgtagcgcatcgtaacgatttttattgtcttggaaccattcccgattgttatggctcctcaactctgtcaagaactctatgatctgttcattcataactttctatttttaatccttacaaatgtaagaaatattagaaactgtaacccagattcagataaaattgcaggttattattccggttcgacaatccaaagttcgtattcatcggaccgactatactgttataagcataaccgatgctacctccccaaacgctttctcccttgaagagatcgaagaaattattctcatggatcgcataattagcgatcaaagagatataatgccgttgcccgatacgctgacgcaagtttaagcggacaatcgccacggaattatcgaatatctccatatggttgatcccggcgaaagggagttgctggggaagataccgttccggcatatcgcctcccaccacattcaaaaagggataagccggatctttcccgatcaacacacgcccatcgatggaaggcaacaggctcaaatgggaagtcagcggcaataccgacaggaagctgagcttcaaggcggagaagaatgtatgtcctttataggtcacgaagttatccgtataaatggaatagtccgcttgcagggaaacgcctttactcgggaagtaacgacgatccaacgtctccagatgggcttgagcgaaatagctgataaagccttccggttttacttgatacttttggttttccgccgtataaaggaatgagttataatcgaaatactcataacgggctcctagcttcaacttgaaattcagccagttcatatccgaatacccgagttccacgaaatgatggcgatacgtcgtatttacgatcttatttcccctgttatacacgtcgaggtcatggtacgtgaacatgtaagacaggttaatattacgcaatggattacgctctatcgcatagtccacccgcccatacatacgtttcccgatcctcccggttacggagaacttcgaatggtaacgggcccgattgtcaaaagtcacattcagcaatagggcgacgatatcctcgctattgaaattcaggcccacattaatcgcgctatttgatttttcctgtaccgtaagcaccaaatcctcctgcctctcgccgactaatttatagcttacattcgagtaaaggtttgtaccgatcacgatagacatggcttcctgcaatttcttcacggtaagcaagctattctctttcaagccgctgatttgcgtcaaccatttctcatcacgaggatctataccttcaaacaagacacgccggatatgaaacgtatcggtaggggctaccggataggaatgtactaatctctttcggtgcatatccgaactatcggataaaccaatcttcttctttaaggcaagaatctcatcccattgcttgcgggcgacttgctcaccccggtcaatcaaggtatccaaggccgtctccccaaaactagcggaattataagggtctgtattcgggcggaacaacagatcggtctgttccttattcggtccgtatttctcataaccatgcaaggcgacgatctgccctacgatatcccaaggggtatttatccgctccaactgtttcaagtcgctagtacccagatctacgccaataatgatatccgcccccatatcccgtgcgacatccgccggatagttattcttgatcccaccatctaccaacaccatgctatccaaacgtaccggtgcgaacacggcaggaatcgccatactggcacgcatagccaacggaagacttccatgatggaaaacatattcttggccgtccaccacattcaacgccacacaagcgaaaggtatattcaattgattgaagtccacggaatcatgatagccgatcgttagattcgagaacaggttctggagattttgcccttttatcatcccttggatcgctatctcttttttactccgcccaaaagggagtgagaatacataacgctcggaattctctttctccggaaaagtaaggctactacgtttcacccggtcgctcaataacatactccagtcctgcaatctcaccatgctatcgatttccgcagcattatatccaacggaatataagccccccacgatagctcccatactagtgccggcaatataatcaatcgggatgccggcctcctccaataccttcaacaccccgatatgagcgacacctttcgccccaccgcctcccagcaccaagccaacctttttccgctcagccatcacagaaggcaccaacatcaacccaaccaaccacaataaaaggaacttcctcatctagatattctttccggcaaatgtagctggtttactcgaaaacgcaaacggattcatctagaataaaacgtatgtttacctatatataaagtttatcgctatctcatctattctataaaccatgccgtgaactgtataaaccaaggcgtggtctgcacattccacggcgtggtttatacagttcacggcgctgatttaagaataaatacttattcgctatggaatgtataggttatcggagaactatttcaacaagagaggaacattttatttccggaacataagtgggcaatcgatagtatttgatacggcctccctaaaattaataggcatttctcgctaaaatcgatttacgtattatgaatcaagtatgtacgtgtttatcaaaaaataatatagccatcaacttacttttttccagcaaggtagcagccggagcaatatattactttttctttttcagcagcatgaccacaggattcgactcttcatccaagtttgcggcgatctccttcaactttccttttagctggcctttctcgtaagcctcaactaagtccggggcatctagagtttggcagatagctatttcggggtttcttggctctgatgttagagagacttcttccttattgatgaaatcatcattgtatagaatatagctgaataaggcattttcttgtttatcatacaccagatcttcaccaaggaaacctttaaacgtcgtaaagtcaacctcttttctcatggttctcataaaacagtagcgatcggtgataacggttggaaaaagaaagactttcgtatccatggaggatatggaagggcttcttacgataaaaggactcagattaccatccggcaagtaatggaatatggtatcagacgatgtattgacaagtatccatttatcccgatccgggaacgtaagataaaattccggcgtaatgacaaactccccttctgtcacaaccggagtctcaatacccttagagggaatctggatctcatgggtgatacggccatcttgtttggaaataatcaaatggcactcccgcttgcctttttccgatggataactcttatagcaaatcaaatgatcacgatcataattaaatatataattataataactggtatccgtgaacttaaaactccttttatagtttcccaataagtcatagacacctatttttctcgccggattatccttgacgaatatctcatcgttatcctcatccaagacaagccctgtaagctgcgtgtattcctcacc
